(19) United States
(12) Patent Application Publication
(10) Pub. No.: US 2022/0259603 A1
(43) Pub. Date: Aug. 18, 2022

(54) METHODS AND CELLS FOR MICROBIAL PRODUCTION OF PHYTOCANNABINOIDS AND PHYTOCANNABINOID PRECURSORS

(71) Applicant: Hyasynth Biologicals Inc., Montréal (CA)

(72) Inventors: Leanne BOURGEOIS, Montréal (CA); Alexander CAMPBELL, Montréal (CA); Elizabeth-Ann KRANJEC, Montréal (CA); Mindy MELGAR, Montréal (CA); Shoham MOOKERJEE, Montréal (CA); Sylvester PALYS, Montréal (CA); Alexandre THERRIEN, Montréal (CA); Curtis WALTON, Montréal (CA); Kevin WOO, Montréal (CA); Xiaohua ZHANG, Montréal (CA)

(21) Appl. No.: 17/610,278

(22) PCT Filed: May 21, 2020
(86) PCT No.: PCT/CA2020/050687

§ 371 Date: Nov. 10, 2021

Related U.S. Application Data
(60) Provisional application No. 62/851,400, filed on May 22, 2019.
(60) Provisional application No. 62/851,333, filed on May 22, 2019.
(60) Provisional application No. 62/851,839, filed on May 23, 2019.
(60) Provisional application No. 62/868,396, filed on Jun. 28, 2019.
(60) Provisional application No. 62/950,515, filed on Dec. 19, 2019.
(60) Provisional application No. 62/981,142, filed on Feb. 25, 2020.
(60) Provisional application No. 62/990,096, filed on Mar. 16, 2020.

(51) Int. Cl. C12N 15/52; C12N 15/70; C12N 15/81; C12N 9/10; C12P 17/04; C12P 7/22; C12P 7/42

(52) U.S. Cl. CPC C12N 15/52; C12N 15/70; C12N 15/81; C12P 7/42; C12P 17/04; C12P 7/22; C12N 9/1085

(57) ABSTRACT

The present disclosure relates generally to methods and cell lines for the production of phytocannabinoids, phytocannabinoid precursors or intermediates, or phytocannabinoid analogue. Methods for transformation of host cells, such as yeast cells, are described. Cells may be transformed, for example, with a polynucleotide encoding a polyketide synthase (PKS) enzyme, a polynucleotide encoding an olivetolic acid cyclase (OAC) enzyme, and/or a polynucleotide encoding a prenyltransferase (PT) enzyme; and optionally a polynucleotide encoding an acyl-CoA synthase (Alk) enzyme; a polynucleotide encoding a fatty acyl CoA activating (CsAAE) enzyme; and/or a polynucleotide encoding a THCa synthase (OXC) enzyme.

### CROSS REFERENCE TO RELATED APPLICATIONS

[0001] This application claims the benefit of and priority to U.S. Provisional Patent Application No. 62/851,400 filed May 22, 2019; U.S. Provisional Patent Application No. 62/851,333 filed May 22, 2019; U.S. Provisional Patent Application No. 62/851,839 filed May 23, 2019; U.S. Provisional Patent Application No. 62/868,396 filed Jun. 28, 2019; U.S. Provisional Patent Application No. 62/950,515 filed Dec. 19, 2019; U.S. Provisional Patent Application No. 62/981,142 filed Feb. 25, 2020; and U.S. Provisional Patent Application No. 62/990,096 filed Mar. 16, 2020, all of which are hereby incorporated by reference.

### FIELD

[0002] The present disclosure relates generally to methods and cell lines for the production of phytocannabinoids, as well as for production of precursors and intermediates in the production phytocannabinoids.

### BACKGROUND

[0003] Phytocannabinoids are a large class of compounds with over 100 different known structures that are produced in the Cannabis sativa plant. Phytocannabinoids are known to be biosynthesized in C. sativa, or may result from thermal or other decomposition from phytocannabinoids biosynthesized in C. sativa. These bio-active molecules, such as tetrahydrocannabinol (THC) and cannabidiol (CBD), can be extracted from plant material for medical and recreational purposes. However, the synthesis of plant material is costly, not readily scalable to large volumes, and requires lengthy growing periods to produce sufficient quantities of phytocannabinoids. While the C. sativa plant is also a valuable source of grain, fiber, and other material, growing C. sativa for phytocannabinoid production, particularly indoors, is costly in terms of energy and labour. Subsequent extraction, purification, and fractionation of phytocannabinoids from the C. sativa plant is also labour and energy intensive.

[0004] Phytocannabinoids are pharmacologically active molecules that contribute to the medical and psychotropic effects of C. sativa. Biosynthesis of phytocannabinoids in the C. sativa plant scales similarly to other agricultural projects. As with other agricultural projects, large scale production of phytocannabinoids by growing C. sativa requires a variety of inputs (e.g. nutrients, light, pest control, CO, etc.). The inputs required for cultivating C. sativa must be provided. In addition, cultivation of C. sativa, where allowed, is currently subject to heavy regulation, taxation, and rigorous quality control where products prepared from the plant are for commercial use, further increasing costs.

[0005] Phytocannabinoid analogues are pharmacologically active molecules that are structurally similar to phytocannabinoids. Phytocannabinoid analogues are often synthesized chemically, which can be labour intensive and costly. As a result, it may be economical to produce the phytocannabinoids and phytocannabinoid analogues in a robust and scalable, fermentable organism. Saccharomyces cerevisiae is an example of a fermentable organism that has been used to produce industrial scales of similar molecules.

[0006] The time, energy, and labour involved in growing C. sativa for production of naturally-occurring phytocannabinoids provides a motivation to produce transgenic cell lines for production of phytocannabinoids by other means. Polyketides, including olivetolic acid and its analogues are valuable precursors to phytocannabinoids.

[0007] Polyketides are precursors to many valuable secondary metabolites in plants. For example, phytocannabinoids, which are naturally produced in Cannabis sativa, other plants, and some fungi, have significant commercial value. Polyketides are a class of compounds which contain (or are derived from compounds containing) a plurality of acetoacetyl groups. Polyketide are synthesized in plants, bacteria, and fungi by polyketide synthases (PKS). Aromatic polyketides are useful in synthesis of phytocannabinoids.

[0008] It is desirable to find alternate methods for the production of phytocannabinoids, and/or for the production of compounds useful in phytocannabinoid synthesis as intermediate or precursor compounds, such as aromatic polyketides.

### SUMMARY

[0009] Numerous methods and aspects thereof are described for producing phytocannabinoids or analogues thereof. Specific summaries of particular aspects of the invention described herein are included in overview within each of the following parts:

[0010] PART 1—Prenyltransferase PT104 For Production of Prenylated Polyketides and Phytocannabinoids

[0011] PART 2—ABBA Family Prenyltransferases For Production Of Prenylated Polyketides and Phytocannabinoids

[0012] PART 3—Polyketide Synthase III and Acyl-CoA Synthases for Production of Aromatic Polyketides and Phytocannabinoids

[0013] PART 4—Dictyostelium discoideum Polyketide Synthase (DiPKS), Olivetolic Acid Cyclase (OAC), Prenyltransferases, and Mutants Thereof for Production Of Phytocannabinoids

[0014] PART 5—Prenyltransferases From Stachybotrys For The Production Of Phytocannabinoids

[0015] PART 6—PKS, NpgA, OAC and Mutants Thereof in the Production Of Polyketides and Phytocannabinoids

[0016] PART 7—Methods and Cells for Production of Phytocannabinoids or Phytocannabinoid Precursors Incorporating Aspects of PART 1 to PART 6

[0017] Other aspects and features of the present disclosure will become apparent to those ordinarily skilled in the art upon review of the following description of specific embodiments in conjunction with the accompanying figures.

### BRIEF DESCRIPTION OF THE FIGURES

[0018] Embodiments of the present disclosure will now be described, by way of example only, with reference to the attached Figures with regard to PARTS 1 to 7.

[0019] Part 1

[0020] FIG. 1 depicts a generalize scheme for the use of the PT104 to attach a prenyl moiety to aromatic polyketides to produce prenylated polyketides.

[0021] FIG. 2 depicts examples of specific aromatic polyketides in the production of phytocannabinoids.

[0022] FIG. 3 depicts structures of phytocannabinoids produced from the C—C bond formation between a polyketide precursor and geranyl pyrophosphate.

[0023] FIG. 4 outlines the native biosynthetic pathway for cannabinoid production in Cannabis sativa.

[0024] FIG. 5 outlines a biosynthetic pathway for cannabinoid synthesis as described herein.

[0025] FIG. 6 depicts the reaction involving PT104 (rdPT1) in the known synthetic pathway to grifolic acid.

[0026] FIG. 7 depicts a synthetic route for cannabigorcinic acid involving PT104.

[0027] FIG. 8 shows de-novo CBGa production by yeast strain HB887.

[0028] FIG. 9 shows de-novo simultaneous production of CBGa and CBGOa by yeast strain HB887.

[0029] Part 2

[0030] FIG. 10 depicts a generalize scheme for the use of the prenyltransferases described herein to attach a prenyl moiety to aromatic polyketides to produce prenylated polyketides.

[0031] FIG. 11 depicts a specific example in the production of cannabinoids.

[0032] FIG. 12 depicts a pathway for production of Cannabigorcinic acid in S. cerevisiae.

[0033] FIG. 13 depicts a chromatogram showing positive production of CBG.

[0034] FIG. 14 depicts a chromatogram showing positive production of CBGa.

[0035] FIG. 15 depicts a chromatogram showing positive production of CBGVa.

[0036] FIG. 16 depicts a chromatogram showing positive production of CBGO.

[0037] FIG. 17 depicts a chromatogram showing positive production of CBGOa.

[0038] FIG. 18 shows in vivo production of orsellinic Acid and CBGOa in strains produced according to Example 3.

[0039] Part 3

[0040] FIG. 19 depicts known pathways involving fatty acid-CoA for formation of different polyketides.

[0041] FIG. 20 schematically depicts pathways for cannabinoid formation by prenylation of polyketides.

[0042] FIG. 21 outlines a biosynthetic pathway for cannabinoid synthesis as described in Example 5.

[0043] FIG. 22 shows production of THCVa in S. cerevisiae using a polyketide synthase according to Examples 6 to 11.

[0044] FIG. 23 shows olivetol and olivetolic acid produced by strains according to Example 6.

[0045] FIG. 24 illustrates divarin, divarinic acid, CBGVa and THCVa produced by strains in Example 7.

[0046] FIG. 25 illustrates octavic acid produced by strains in Example 8.

[0047] FIG. 26 shows C5-alkynyl cannabigerolic acid peak area produced by strains in Example 9.

[0048] FIG. 27 illustrates C5-alkenyl cannabigerolic acid produced by strains in Example 10.

[0049] Part 4

[0050] FIG. 28 is a schematic of biosynthesis of olivetolic acid and related compounds with different alkyl group chain lengths in C. sativa.

[0051] FIG. 29 is a schematic of biosynthesis of CBGa from hexanoic acid, malonyl-CoA, and geranyl pyrophosphate in C. sativa.

[0052] FIG. 30 is a schematic of biosynthesis of downstream phytocannabinoids in acid form CBGa C. sativa.

[0053] FIG. 31 is a schematic of biosynthesis of MPBD by DiPKS.

[0054] FIG. 32 is a schematic of functional domains in DiPKS, with mutations to a C-methyl transferase that for lowering methylation of olivetol.

[0055] FIG. 33 is a schematic of biosynthesis of CBGa in a transformed yeast cell by DiPKS^{G1516R}, csOAC and PT254.

[0056] FIG. 34 is a schematic of biosynthesis of THCa in a transformed yeast cell by DiPKS^{G1516R}, csOAC, PT254 and THCa Synthase.

[0057] FIG. 35 shows production of olivetolic acid by DiPKS^{G1516R} and csOAC in a strain of S. cerevisiae.

[0058] FIG. 36 shows production of CBGa by DiPKS^{G1516R}, csOAC and PT254 in two strains of S. cerevisiae.

[0059] FIG. 37 shows production of olivetolic acid by DiPKS^{G1516R} and csOAC in a strain of S. cerevisiae and of CBGa and olivetolic acid by DiPKS^{G1516R}, csOAC and PT254 in two strains of S. cerevisiae.

[0060] FIG. 38 shows production of THCa acid by DiPKS^{G1516R}, csOAC, PT254 and THCA synthase in a strain of S. cerevisiae.

[0061] Part 5

[0062] FIG. 39 depicts a generalize scheme for the use of the PT72, PT273, or PT296 to attach a prenyl moiety to aromatic polyketides to produce prenylated polyketides.

[0063] FIG. 40 depicts examples of specific aromatic polyketides in the production of phytocannabinoids.

[0064] FIG. 41 depicts a synthetic route for cannabigorcinic acid involving PT72, PT273, or PT296.

[0065] Part 6

[0066] FIG. 42 is a schematic of biosynthesis of MPBD by DiPKS, synthesis of olivetol by DiPKS^{G1516R} and synthesis of olivetolic acid by DiPKS^{G1516R} and csOAC.

[0067] FIG. 43 shows production data for MPBD and olivetol in eight strains of S. cerevisiae.

[0068] FIG. 44 shows production data for olivetolic acid and olivetol in four strains of S. cerevisiae.

[0069] FIG. 45 shows production data for olivetolic acid and olivetol in nine strains of S. cerevisiae.

### DETAILED DESCRIPTION

[0070] Certain terms used herein are described below.

[0071] The term “cannabinoid” as used herein refers to a chemical compound that shows direct or indirect activity at a cannabinoid receptor. Non limiting examples of cannabinoids include tetrahydrocannabinol (THC), cannabidiol (CBD), cannabinol (CBN), cannabigerol (CBG), cannabichromene (CBC), cannabicyclol (CBL), cannabivarin (CBV), tetrahydrocannabivarin (THCV), cannabidivarin (CBDV), cannabichromevarin (CBCV), cannabigerovarin (CBGV), and cannabigerol monomethyl ether (CBGM).

[0072] The term “phytocannabinoid” as used herein refers to a cannabinoid that typically occurs in a plant species. Exemplary phytocannabinoids produced according to the invention include cannabigerol (CBG), cannabigerolic acid (CBGa), cannabigerovarin (CBGv), cannabigerovarinic acid (CBGva), cannabigerocin (CBGo), or cannabigerocinic acid (CBGoa).

[0073] Cannabinoids and phytocannabinoids may contain or may lack one or more carboxylic acid functional groups. Non limiting examples of such cannabinoids or phytocannabinoids containing carboxylic acid function groups or phytocannabinoids include tetrahydrocannabinolic acid (THCA), cannabidiolic acid (CBDA), and cannabichromenic acid (CBCA).

[0074] The term “homologue” includes homologous sequences from the same and other species and orthologous sequences from the same and other species. Different polynucleotides or polypeptides having homology may be referred to as homologues.

[0075] The term “homology” may refer to the level of similarity between two or more polynucleotide and/or polypeptide sequences in terms of percent of positional identity (i.e., sequence similarity or identity). Homology also refers to the concept of similar functional properties among different polynucleotide or polypeptides. Thus, the compositions and methods herein may further comprise homologues to the polypeptide and polynucleotide sequences described herein.

[0076] The term “orthologous,” as used herein, refers to homologous polypeptide sequences and/or polynucleotide sequences in different species that arose from a common ancestral gene during speciation.

[0077] As used herein, a “homologue” may have a significant sequence identity (e.g., 70%, 71%, 72%, 73%, 74%, 75%, 76%, 77%, 78%, 79%, 80%, 81%, 82%, 83%, 84%, 85%, 86%, 87%, 88%, 89%, 90%, 91%, 92%, 93%, 94%, 95%, 96%, 97%, 98%, or 99% and/or 100%) to the polynucleotide sequences herein.

[0078] As used herein “sequence identity” refers to the extent to which two optimally aligned polynucleotide or peptide sequences are invariant throughout a window of alignment of components, e.g., nucleotides or amino acids. “Identity” can be readily calculated by known methods.

[0079] As used herein, the term “percent sequence identity” or “percent identity” refers to the percentage of identical nucleotides in a linear polynucleotide sequence of a reference (“query”) polynucleotide molecule (or its complementary strand) as compared to a test (“subject”) polynucleotide molecule (or its complementary strand) when the two sequences are optimally aligned. In some embodiments, “percent identity” can refer to the percentage of identical amino acids in an amino acid sequence.

[0080] The terms “fatty acid-CoA”, “fatty acyl-CoA”, or “CoA donors” as used herein may refer to compounds useful in polyketide synthesis as primer molecules which react in a condensation reaction with an extender unit (such as malonyl-CoA) to form a polyketide. Examples of fatty acid-CoA molecules (also referred to herein as primer molecules or CoA donors), useful in the synthetic routes described herein include but are not limited to: acetyl-CoA, butyryl-CoA, hexanoyl-CoA. These fatty acid-CoA molecules may be provided to host cells or may be synthesized by the host cells for biosynthesis of polyketides, as described herein.

[0081] Two nucleotide sequences can be considered to be substantially “complementary” when the two sequences hybridize to each other under stringent conditions. In some examples, two nucleotide sequences considered to be substantially complementary hybridize to each other under highly stringent conditions.

[0082] The terms “stringent hybridization conditions” and “stringent hybridization wash conditions” in the context of nucleic acid hybridization experiments, for example in Southern hybridizations and Northern hybridizations are sequence dependent, and are different under different environmental parameters. In some examples, generally, highly stringent hybridization and wash conditions are selected to be about 5° C. lower than the thermal melting point (Tm) for the specific sequence at a defined ionic strength and pH.

[0083] In some examples, polynucleotides include polynucleotides or “variants” having at least about 50%, 55%, 60%, 65%, 70%, 75%, 80%, 85%, 90%, 95%, 96%, 97%, 98%, 99% or 100% sequence identity to any of the reference sequences described herein, typically where the variant maintains at least one biological activity of the reference sequence.

[0084] As used herein, the terms “polynucleotide variant” and “variant” and the like refer to polynucleotides displaying substantial sequence identity with a reference polynucleotide sequence or polynucleotides that hybridize with a reference sequence under, for example, stringent conditions. These terms may include polynucleotides in which one or more nucleotides have been added or deleted, or replaced with different nucleotides compared to a reference polynucleotide. It will be understood that that certain alterations inclusive of mutations, additions, deletions and substitutions can be made to a reference polynucleotide whereby the altered polynucleotide retains the biological function or activity of the reference polynucleotide.

[0085] In some examples, the polynucleotides described herein may be included within “vectors” and/or “expression cassettes”.

[0086] In some embodiments, the nucleotide sequences and/or nucleic acid molecules described herein may be “operably” or “operatively” linked to a variety of promoters for expression in host cells. Thus, in some examples, the invention provides transformed host cells and transformed organisms comprising the transformed host cells, wherein the host cells and organisms are transformed with one or more nucleic acid molecules/nucleotide sequences of the invention. As used herein, “operably linked to,” when referring to a first nucleic acid sequence that is operably linked to a second nucleic acid sequence, means a situation when the first nucleic acid sequence is placed in a functional relationship with the second nucleic acid sequence. For instance, a promoter is operably associated with a coding sequence if the promoter effects the transcription or expression of the coding sequence.

[0087] In the context of a polypeptide, “operably linked to,” when referring to a first polypeptide sequence that is operably linked to a second polypeptide sequence, refers to a situation when the first polypeptide sequence is placed in a functional relationship with the second polypeptide sequence.

[0088] The term a “promoter,” as used herein, refers to a nucleotide sequence that controls or regulates the transcription of a nucleotide sequence (i.e., a coding sequence) that is operably associated with the promoter. Typically, a “promoter” refers to a nucleotide sequence that contains a binding site for RNA polymerase II and directs the initiation of transcription. In general, promoters are found 5′, or upstream, relative to the start of the coding region of the corresponding coding sequence. The promoter region may comprise other elements that act as regulators of gene expression.

[0089] Promoters can include, for example, constitutive, inducible, temporally regulated, developmentally regulated, chemically regulated, tissue-preferred and tissue-specific promoters for use in the preparation of recombinant nucleic acid molecules, i.e., chimeric genes.

[0090] The choice of promoter will vary depending on the temporal and spatial requirements for expression, and also depending on the host cell to be transformed. Thus, for example, where expression in response to a stimulus is desired a promoter inducible by stimuli or chemicals can be used. Where continuous expression at a relatively constant level is desired throughout the cells or tissues of an organism a constitutive promoter can be chosen.

[0091] In some examples, vectors may be used.

[0092] In some examples, the polynucleotide molecules and nucleotide sequences described herein can be used in connection with vectors.

[0093] The term “vector” refers to a composition for transferring, delivering or introducing a nucleic acid or polynucleotide into a host cell. A vector may comprise a polynucleotide molecule comprising the nucleotide sequence(s) to be transferred, delivered or introduced. Non-limiting examples of general classes of vectors include, but are not limited to, a viral vector, a plasmid vector, a phage vector, a phagemid vector, a cosmid, a fosmid, a bacteriophage, or an artificial chromosome. The selection of a vector will depend upon the preferred transformation technique and the target species for transformation.

[0094] As used herein, “expression vectors” refers to a nucleic acid molecule comprising a nucleotide sequence of interest, wherein said nucleotide sequence is operatively associated with at least a control sequence (e.g., a promoter). Thus, some examples provide expression vectors designed to express the polynucleotide sequences of described herein.

[0095] An expression vector comprising a polynucleotide sequence of interest may be “chimeric”, meaning that at least one of its components is heterologous with respect to at least one of its other components. An expression cassette may also be one that is naturally occurring but has been obtained in a recombinant form useful for heterologous expression. In some examples, however, the expression vector is heterologous with respect to the host. For example, the particular polynucleotide sequence of the expression vector does not occur naturally in the host cell and must have been introduced into the host cell or an ancestor of the host cell by a transformation event.

[0096] In some examples, an expression vector may also include other regulatory sequences. As used herein, “regulatory sequences” means nucleotide sequences located upstream (5′ non-coding sequences), within or downstream (3′ non-coding sequences) of a coding sequence, and which influence the transcription, RNA processing or stability, or translation of the associated coding sequence. Regulatory sequences include, but are not limited to, promoters, enhancers, introns, 5′ and 3′ untranslated regions, translation leader sequences, termination signals, and polyadenylation signal sequences.

[0097] An expression vector may also include a nucleotide sequence for a selectable marker, which can be used to select a transformed host cell.

[0098] As used herein, “selectable marker” means a nucleotide sequence that when expressed imparts a distinct phenotype to the host cell expressing the marker and thus allows such transformed host cells to be distinguished from those that do not have the marker. Such a nucleotide sequence may encode either a selectable or screenable marker, depending on whether the marker confers a trait that can be selected for by chemical means, such as by using a selective agent (e.g., an antibiotic, a sugar, a carbon source, or the like), or on whether the marker is simply a trait that one can identify through observation or testing, such as by screening. Examples of suitable selectable markers are known in the art and can be used in the expression vectors described herein.

[0099] The vector and/or expression vectors and/or polynucleotides may be introduced in to a cell.

[0100] The term “introducing,” in the context of a nucleotide sequence of interest (e.g., the nucleic acid molecules/constructs/expression vectors), refers to presenting the nucleotide sequence of interest to cell host in such a manner that the nucleotide sequence gains access to the interior of a cell. Where more than one nucleotide sequence is to be introduced these nucleotide sequences can be assembled as part of a single polynucleotide or nucleic acid construct, or as separate polynucleotide or nucleic acid constructs, and can be located on the same or different transformation vectors. Accordingly, these polynucleotides may be introduced into host cells in a single transformation event, or in separate transformation events.

[0101] As used herein, the term “contacting” refers to a process by which, for example, a compound may be delivered to a cell. The compound may be administered in a number of ways, including, but not limited to, direct introduction into a cell (i.e., intracellularly) and/or extracellular introduction into a cavity, interstitial space, or into the circulation of the organism.

[0102] The term “transformation” or “transfection” as used herein refers to the introduction of a polynucleotide or heterologous nucleic acid into a cell. Transformation of a cell may be stable or transient.

[0103] The term “transient transformation” as used herein in the context of a polynucleotide refers to a polynucleotide introduced into the cell and does not integrate into the genome of the cell.

[0104] The terms “stably introducing” or “stably introduced” in the context of a polynucleotide introduced into a cell is intended to represent that the introduced polynucleotide is stably incorporated into the genome of the cell, and thus the cell is stably transformed with the polynucleotide.

[0105] The term “host cell” includes an individual cell or cell culture which can be or has been a recipient of any recombinant vector(s) or isolated polynucleotide of the invention. Host cells include progeny of a single host cell, and the progeny may not necessarily be completely identical (in morphology or in total DNA complement) to the original parent cell due to natural, accidental, or deliberate mutation and/or change. A host cell includes cells transformed in vivo or in vitro with a recombinant vector or a polynucleotide of the invention. A host cell which comprises a recombinant vector of the invention is a recombinant host cell.

[0106] In some examples, a host cell may be a bacterial cell, a fungal cell, a protist cell, or a plant cell. Specific examples of host cells are described below.

### Part 1

[0107] Prenyltransferase PT104 for Production of Prenylated Polyketides and Phytocannabinoids

[0108] This section relates generally to methods and cell lines for the production of phytocannabinoids using host cells transformed with a sequence encoding a PT104 prenyltransferase protein. Examples include production of a variety of cannabinoids in yeast.

### Overview

[0109] There is provided herein a method of producing a phytocannabinoid or phytocannabinoid analogue in a host cell that produces a polyketide and a prenyl donor. The method comprises transforming the host cell with a sequence encoding a prenyltransferase PT104 protein and culturing the transformed host cell to produce the phytocannabinoid or phytocannabinoid analogue.

[0110] Further, there is provided herein a method of producing a phytocannabinoid or phytocannabinoid analogue, comprising providing a host cell which produces a polyketide precursor and a prenyl donor, introducing into the host cell a polynucleotide encoding a prenyltransferase PT104 protein, and culturing the host cell under conditions sufficient for production of the prenyltransferase PT104 protein for producing the phytocannabinoid or phytocannabinoid analogue from the polyketide precursor and the prenyl donor. The PT104 protein is a protein as set forth in SEQ ID NO:1; a protein with at least 70% identity with SEQ ID NO:1; a protein that differs from SEQ ID NO:1 by one or more residues that are substituted, deleted and/or inserted; or derivatives thereof bearing prenyltransferase activity.

[0111] Additionally, there is provided herein an expression vector comprising a nucleotide sequence encoding prenyltransferase PT104 protein, wherein the nucleotide sequence comprises at least 70% identity with positions 98-1153 of SEQ ID NO:17, or wherein the prenyltransferase PT104 protein comprises at least 70% identity with SEQ ID NO:1. Host cells transformed with the expression vector are also described.

### Detailed Description of Part 1

[0112] Generally, there is described herein the production of phyotocannabinoids or phytocannabinoid analogues.

[0113] The method described herein produces a phytocannabinoid or a phytocannabinoid analogue in a host cell, which host cell comprises or is capable of producing a polyketide and a prenyl donor. The method comprises transforming the host cell with a sequence encoding a prenyltransferase PT104 protein, and subsequently culturing the transformed cell to produce said phytocannabinoid or phytocannabinoid analogue.

[0114] The PT104 protein may be one having one of the following characteristics: (a) a protein as set forth in SEQ ID NO:1; (b) a protein with at least 70% identity with SEQ ID NO:1; (c) a protein that differs from (a) by one or more residues that are substituted, deleted and/or inserted; or (d) a derivative of (a), (b), or (c).

[0115] The sequence encoding the prenyltransferase PT104 protein may have one of the following characteristics: (a) a nucleotide sequence as set forth in positions 98-1153 of SEQ ID NO:17; (b) a nucleotide sequence having at least 70% identity with the nucleotide sequence of (a); (c) a nucleotide sequence that hybridizes with the complementary strand of the nucleic acid of (a) and it may be that such a polynucleotide hybridizes with the complementary strand under conditions of high stringency; (d) a nucleotide sequence that differs from (a) by one or more nucleotides that are substituted, deleted, and/or inserted; or (e) a derivative of (a), (b), (c), or (d).

[0116] The polyketide may be one of the following:

[chemical structure]

[chemical structure]

[0117] The prenyl donor may have the following structure:

[chemical structure]

[0118] For example, the prenyl donor may be geranyl diphosphate (GPP), farnesyl diphosphate (FPP), or neryl diphosphate (NPP).

[0119] The phytocannabinoid or phytocannabinoid analogue formed may be:

[chemical structure]

[0120] The protein encoded by the nucleotide sequence with which the host cell is transformed may have at least 70%, 71%, 72%, 73%, 74%, 75%, 76%, 77%, 78%, 79%, 80%, 81%, 82%, 83%, 84%, 85%, 86%, 87%, 88%, 89%, 90%, 91%, 92%, 93%, 94%, 95%, 96%, 97%, 98%, or 99% sequence identity to the prenyltransferase PT104 protein of SEQ ID NO:1.

[0121] The nucleotide sequence may have at least 70%, 71%, 72%, 73%, 74%, 75%, 76%, 77%, 78%, 79%, 80%, 81%, 82%, 83%, 84%, 85%, 86%, 87%, 88%, 89%, 90%, 91%, 92%, 93%, 94%, 95%, 96%, 97%, 98%, or 99% sequence identity to positions 98-1153 of SEQ ID NO:17.

[0122] The polyketide prenylated in the method may be olivetol, olivetolic acid, divarin, divarinic acid, orcinol, or orsellinic acid.

[0123] The phytocannabinoid so formed may be cannabigerol (CBG), cannabigerolic acid (CBGa), cannabigerovarin (CBGv), cannabigerovarinic acid (CBGva), cannabigerocin (CBGO), or cannabigerocinic acid (CBGOa).

[0124] As exemplary embodiments, when the polyketide is olivetol then the phytocannabinoid formed is cannabigerol (CBG); when the polyketide is olivetolic acid then the phytocannabinoid formed is cannabigerolic acid (CBGa); when the polyketide is divarin then the phytocannabinoid formed is cannabigerovarin (CBGv); when the polyketide is divarinic acid then the phytocannabinoid formed is cannabigerovarinic acid (CBGva); when the polyketide is orcinol then the phytocannabinoid is cannabigerocin (CBGO); and when the polyketide is orsellinic acid then the phytocannabinoid is cannabigerocinic acid (CBGOa).

[0125] The host cell can be a bacterial cell, a fungal cell, a protist cell, or a plant cell, such as any of the exemplary cell types noted herein in Table 2. Exemplary host cell types include S. cerevisiae, E. coli, Yarrowia lipolytica, and Komagataella phaffii.

[0126] A method is described for producing a phytocannabinoid or phytocannabinoid analogue, comprising: providing a host cell which produces a polyketide precursor and a prenyl donor, introducing into the host cell a polynucleotide encoding a prenyltransferase PT104 protein, and culturing the host cell under conditions sufficient for production of the prenyltransferase PT104 protein for producing the phytocannabinoid or phytocannabinoid analogue from the polyketide precursor and the prenyl donor.

[0127] In any of the methods described herein, the host cell may have one or more additional genetic modification, such as for example: (a) a nucleic acid as set forth in any one of SEQ ID NO:2 to SEQ ID NO:14; (b) a nucleic acid having at least 70% identity with the nucleotide sequence of (a); (c) a nucleic acid that hybridizes with the complementary strand of the nucleic acid of (a); (d) a nucleic acid encoding a polypeptide with the same enzyme activity as the polypeptide encoded by any one of the nucleic acid sequences of (a); (e) a nucleotide sequence that differs from (a) by one or more nucleotides that are substituted, deleted, and/or inserted; or (f) a derivative of (a), (b), (c), (d), or (e). Such an additional genetic modification may comprise, for example, one or more of NpgA (SEQ ID NO:2), PDH (SEQ ID NO:8), Maf1 (SEQ ID NO:9), Erg20K197E (SEQ ID NO:10), tHMGr-IDI (SEQ ID NO:12), and/or PGK1p:ACC^{1S659A,S1157A} (SEQ ID NO:13).

[0128] One or more genetic modification may be made to the host cell in order to increase the available pool of terpenes and/or malonyl-coA in the cell. For example, such a genetic modification may include tHMGr-IDI (SEQ ID NO: 12); PGK1p:ACC^{1S659A,S1157A} (SEQ ID NO:13); and/or Erg20K197E (SEQ ID NO:10).

[0129] There is described herein an expression vector comprising a nucleotide sequence encoding prenyltransferase PT104 protein, wherein the nucleotide sequence comprises at least 70% identity with positions 98-1153 of SEQ ID NO:17, or wherein the prenyltransferase PT104 protein comprises at least 70% identity with SEQ ID NO:1.

[0130] In such an expression vector, the nucleotide sequence encoding the prenyltransferase PT104 protein may comprises, for example, at least 71%, 72%, 73%, 74%, 75%, 76%, 77%, 78%, 79%, 80%, 81%, 82%, 83%, 84%, 85%, 86%, 87%, 88%, 89%, 90%, 91%, 92%, 93%, 94%, 95%, 96%, 97%, 98%, or 99% sequence identity with positions 98-1153 of SEQ ID NO:17.

[0131] In such an expression vector the prenyltransferase PT104 protein may be one having at least 71%, 72%, 73%, 74%, 75%, 76%, 77%, 78%, 79%, 80%, 81%, 82%, 83%, 84%, 85%, 86%, 87%, 88%, 89%, 90%, 91%, 92%, 93%, 94%, 95%, 96%, 97%, 98%, or 99% sequence identity with SEQ ID NO:1.

[0132] A host cell is described herein that is transformed with any one of the expression vectors describe, wherein transformation occurs according to any known process. Such a host cell may additionally comprising one or more of: (a) a nucleic acid as set forth in any one of SEQ ID NO:2 to SEQ ID NO:14; (b) a nucleic acid having at least 70% identity with the nucleotide sequence of (a); (c) a nucleic acid that hybridizes with the complementary strand of the nucleic acid of (a), and this hybridization may occur under stringent conditions; (d) a nucleic acid encoding a protein with the same enzyme activity as the protein encoded by any one of the nucleic acid sequences of (a); (e) a nucleic acid that differs from (a) by one or more nucleotides that are substituted, deleted, and/or inserted; or (f) a derivative of (a), (b), (c), (d), or (e).

[0133] The host cell may be a bacterial cell, a fungal cell, a protist cell, or a plant cell, such as any cell described herein. Exemplary cells include S. cerevisiae, E. coli, Yarrowia lipolytica, and Komagataella phaffii.

[0134] The methods, vectors, and cell lines described herein may advantageously be used for the production of phytocannabinoids. By utilizing a protein having prenyltransferase activity, such as PT104 from Rhododendron dauricum, the transformation into a heterologous host cell permits the production of cannabinoids without requiring growth of a whole plant. Cannabinoids such as, but not limited to, CBGa and CBGOa, can be prepared and isolated economically and under controlled conditions. Advantageously, it has been found that PT014 functions well in host cells, such as but not limited to yeast, permitting efficient prenylation of aromatic polyketides in the pathway of phytocannabinoid synthesis.

[0135] Phytocannabinoids are a large class of compounds with over 100 different known structures that are produced in the Cannabis sativa plant. These bio-active molecules, such as tetrahydrocannabinol (THC) and cannabidiol (CBD), can be extracted from plant material for medical and recreational purposes.

[0136] Phytocannabinoids are synthesized from polyketide and terpenoid precursors which are derived from two major secondary metabolism pathways in the cell. For example, the C—C bond formation between the polyketide olivetolic acid and the allylic isoprene diphosphate geranyl pyrophosphate (GPP) produces the cannabinoid cannabigerolic acid (CBGa). This reaction type is catalyzed by enzymes known as prenyltransferases. The Cannabis plant utilizes a membrane-bound prenyltransferase to catalyze the addition of the prenyl moiety to olivetolic acid to form CBGa.

[0137] The prenyltransferase referenced herein as “PT104”, which may interchangeably be referenced as d31RdPT1, is known as a daurichromenic acid synthase, an integral membrane protein from Rhododendron dauricum, that has been characterized to convert orsellinic acid and farnesyl pyrophosphate (FPP) to grifolic acid (Saeki et al., 2018).

[0138] PT102 (rdPT1) has known utility in the synthetic pathway to grifolic acid, which is an intermediate in the production of daurichromenic acid, a small molecule with anti-HIV properties. PT104 was previously characterized to strictly prefer orsellinic acid as the polyketide precursor and farnesyl pyrophosphate as the preferred prenyl donor. However, it has been surprisingly found, as described herein, that olivetolic acid and GPP can also be taken as substrates for the truncated enzyme, which may thus advantageously be used in phytocannabionoid synthesis. As described herein, PT104 may be used to transform a host cell, for use in prenylating polyketides in the pathway to phytocannabinoid synthesis.

[0139] In one aspect, there is a method described of producing a phytocannabinoid or phytocannabinoid analogue, comprising: utilizing PT104, a recombinant prenyltransferase, to react a polyketide with a GPP to produce a phytocannabinoid or phytocannabinoid analogue.

[0140] In one aspect there is described a method of producing cannabigorcinic acid (CBGOa), comprising: providing a host cell which produces orsellinic acid; introducing a polynucleotide encoding prenyltransferase PT014 polypeptide into said host cell, culturing the host cell under conditions sufficient for PT104 polypeptide production in effective amounts to react with geranyl phyrophosphate to produce CBGOa.

[0141] In one aspect there is described a method of producing cannabigorcinic acid (CBGOa), comprising: culturing a host cell which produces orsellinic acid and comprises a polynucleotide encoding prenyltransferase PT104 polypeptide under conditions sufficient for PTase polypeptide production.

[0142] Non limiting examples of phytocannabinoids that can be prepared according to the methods describe include the following, and their acids, tetrahydrocannabinol (THC), cannabidiol (CBD), cannabinol (CBN), cannabigerol (CBG), cannabichromene (CBC), cannabicyclol (CBL), cannabivarin (CBV), tetrahydrocannabivarin (THCV), cannabidivarin (CBDV), cannabichromevarin (CBCV), cannabigerovarin (CBGV), and cannabigerol monomethyl ether (CBGM). Acid forms

[0143] FIG. 1 depicts a generalized scheme for the use of the PT104, as described herein, to attach a prenyl moiety to aromatic polyketides to produce prenylated polyketides.

[0144] FIG. 2 depicts examples of specific aromatic polyketides used in the pathway to the production of phytocannabinoids.

[0145] FIG. 3 depicts structures of certain phytocannabinoids produced from the C—C bond formation between a polyketide precursor and geranyl pyrophosphate.

[0146] In some example, the cannabinoid or phytocannabinoid may have one or more carboxylic acid functional groups. Non limiting examples of such cannabinoids or phytocannabinoids include tetrahydrocannabinolic acid (THCA), cannabidiolic acid (CBDA), cannabichromenic acid (CBCA), and tetrahydrocannabivarin acid (THCVa).

[0147] In some example, the cannabinoid or phytocannabinoid may lack carboxylic acid functional groups. Non limiting examples of such cannabinoids or phytocannabinoids include THC, CBD, CBG, CBC, and CBN.

[0148] In some examples of the method described herein, the phytocannabinoid produced is cannabigerol (CBG), cannabigerolic acid (CBGa), cannabigerovarin (CBGv), cannabigerovarinic acid (CBGva), cannabigerocin (CBGo), or cannabigerocinic acid (CBGoa).

[0149] In some examples of the method described herein, the polyketide is olivetol, olivetolic acid, divarin, divarinic acid, orcinol, or orsellinic acid.

[0150] In some example of the method herein, when the polyketide is olivetol the phytocannabinoid formed is cannabigerol (CBG), when the polyketide is olivetolic acid then the phytocannabinoid is cannabigerolic acid (CBGa), when the polyketide is divarin then the phytocannabinoid is cannabigerovarin (CBGv), when the polyketide is divarinic acid then the phytocannabinoid is cannabigerovarinic acid (CBGva), when the polyketide is orcinol then the phytocannabinoid is cannabigerocin (CBGo), and when the polyketide is orsellinic acid then the phytocannabinoid is cannabigerocinic acid (CBGoa).

[0151] Table 1 provides a list of polyketides, prenyl donors and resulting prenylated polyketides. The following terms are used: DMAPP for dimethylallyl diphosphate; GPP for geranyl diphosphate; FPP for farnesyl diphosphate; NPP for neryl diphosphate; and IPP for isopentenyl diphosphate.

TABLE 1
Polyketides, Prenyl Donors and Prenylated Polyketides

| | | | Prenylated Polyketide |
|---|---|---|---|
| # | Polyketide Structure | Prenyl Structure | Structure |
| 1 | [chemical structure] | [chemical structure] | [chemical structure] |
| 2 | [chemical structure] | [chemical structure] | [chemical structure] |
| 3 | [chemical structure] | [chemical structure] | [chemical structure] |
| | [chemical structure] | | [chemical structure] |
| | [chemical structure] | | [chemical structure] |
| | [chemical structure] | | [chemical structure] |

[0152] Table 2 lists specific examples of host cell organisms for use in one or more of the methods described herein.

TABLE 2
List of Host Cell Organisms

| Type | Organisms |
|---|---|
| Bacteria | Escherichia coli, Streptomyces coelicolor and other species., Bacillus |
| | subtilis, Mycoplasma genitalium, Synechocytis, Zymomonas mobilis, |
| | Corynebacterium glutamicum, Synechococcus sp., Salmonella typhi, |
| | Shigella flexneri, Shigella sonnei, and Shigella disenteriae, Pseudomonas |
| | putida, Pseudomonas aeruginosa, Pseudomonas mevalonii, Rhodobacter |
| | sphaeroides, Rhodobacter capsulatus, Rhodospirillum rubrum, |
| | Rhodococcus sp. |
| Fungi | Saccharomyces cerevisiae, Ogataea polymorpha, Komagataella phaffii, |
| | Kluyveromyces lactis, Neurospora crassa, Aspergillus niger, Aspergillus |
| | nidulans, Schizosaccharomyces pombe, Yarrowia lipolytica, |
| | Myceliophthora thermophila, Aspergillus oryzae, Trichoderma reesei, |
| | Chrysosporium lucknowense, Fusarium sp., Fusarium gramineum, |
| | Fusarium venenatum, Pichia finlandica, Pichia trehalophila, Pichia |
| | koclamae, Pichia membranaefaciens, Pichia opuntiae, Pichia |
| | thermotolerans, Pichia salictaria, Pichia guercuum, Pichia pijperi, Pichia |
| | stipitis, Pichia methanolica, Hansenula polymorpha. |
| Protists | Chlamydomonas reinhardtii, Dictyostelium discoideum, Chlorella sp., |
| | Haematococcus pluvialis, Arthrospira platensis, Dunaliella sp., |
| | Nannochloropsis oceanica. |
| Plants | Cannabis sativa, Arabidopsis thaliana, Theobroma cacao, maize, banana, |
| | peanut, field peas, sunflower, Nicotiana sp., tomato, canola, wheat, barley, |
| | oats, potato, soybeans, cotton, sorghum, lupin, rice. |

[0153] Table 3 lists the sequences described herein, for greater certainty. Actual sequences are provided in later tables, below.

TABLE 3
List of sequence characteristics

| | | | Length of | Position of coding |
|---|---|---|---|---|
| SEQ ID NO: | Description | DNA/Protein | sequence | sequence |
| SEQ ID NO. 1 | PT104 aa sequence | Protein | 102 | all |
| SEQ ID NO. 2 | NpgA | DNA | 3564 | 1170-2201 |
| SEQ ID NO. 3 | DiPKS-1 | DNA | 11114 | 849-10292 |
| SEQ ID NO. 4 | DiPKS-2 | DNA | 10890 | 717-10160 |
| SEQ ID NO. 5 | DiPKS-3 | DNA | 11300 | 795-10238 |
| SEQ ID NO. 6 | DiPKS-4 | DNA | 11140 | 794-10237 |
| SEQ ID NO. 7 | DiPKS-5 | DNA | 11637 | 1172-10615 |
| SEQ ID NO. 8 | PDH | DNA | 7114 | Ald6: 1444-2949 |
| | | | | ACS: 3888-5843 |
| SEQ ID NO. 9 | Maf1 | DNA | 3256 | 936-2123 |
| SEQ ID NO. 10 | Erg20K197E | DNA | 4254 | 2683-3423 |
| SEQ ID NO. 11 | Erg1p:UB14- | DNA | 3503 | 1364-2701 |
| | Erg20:deg | | | |
| SEQ ID NO. 12 | tHMGr-IDI | DNA | 4843 | tHMGR1: 877-2385 |
| | | | | IDI1: 3209-4075 |
| SEQ ID NO. 13 | PGK1p:ACC1^{S659A, S1157A} | DNA | 7673 | Pgk1p: 222-971 |
| | | | | Acc1mut: 972-7673 |
| SEQ ID NO. 14 | OAC | DNA | 2177 | 842-1150 |
| SEQ ID NO. 15 | csOAC aa sequence | Protein | 102 | all |
| SEQ ID NO. 16 | DiPKSG1516R aa | Protein | 3147 | all |
| | sequence | | | |
| SEQ ID NO. 17 | PLAS250 | DNA | 6841 | 98-1153 |
| SEQ ID NO. 18 | PLAS36 | DNA | 8980 | |

[0154] Method of the invention are conveniently practiced by providing the compounds and/or compositions used in such method in the form of a kit. Such kit preferably contains the composition. Such a kit preferably contains instructions for the use thereof.

[0155] To gain a better understanding of the invention described herein, the following examples are set forth. It should be understood that these examples are for illustrative purposes only. Therefore, they should not limit the scope of this invention in anyway.

### EXAMPLES—PART 1

### Example 1

[0156] PT104 in Production of Prenylated Polyketides in Yeast

[0157] Introduction. Phytocannabinoids are naturally produced in Cannabis sativa, other plants, and some fungi. Over 105 phytocannabinoids are known to be biosynthesized in C. sativa, or result from thermal or other decomposition from phytocannabinoids biosynthesized in C. sativa. While the C. sativa plant is also a valuable source of grain, fiber, and other material, growing C. sativa for phytocannabinoid production, particularly indoors, is costly in terms of energy and labour. Subsequent extraction, purification, and fractionation of phytocannabinoids from the C. sativa plant is also labour and energy intensive.

[0158] Phytocannabinoids are pharmacologically active molecules that contribute to the medical and psychotropic effects of C. sativa. Biosynthesis in the C. sativa plant scales similarly to other agricultural projects. As with other agricultural projects, large scale production of phytocannabinoids by growing C. sativa requires a variety of inputs (e.g. nutrients, light, pest control, CO2, etc.). The inputs required for cultivating C. sativa must be provided. In addition, cultivation of C. sativa, where allowed, is currently subject to heavy regulation, taxes, and rigorous quality control where products prepared from the plant are for commercial use, further increasing costs. As a result, it may be economical to produce the phytocannabinoids in a robust and scalable, fermentable organism. Saccharomyces cerevisiae has been used to produce industrial scales of similar molecules.

[0159] The time, energy, and labour involved in growing C. sativa for phytocannabinoid production provides a motivation to produce transgenic cell lines for production of phytocannabinoids in yeast. One example of such efforts is provided in International patent application by Mookerjee et al. WO2018/148848.

[0160] Production of phytocannabinoids in genetically modified strains of Saccharomyces cerevisiae are described in this Example. The modified strains have been transformed with genes coding for a prenyltransferase (PT104) from Rhododendron dauricum that catalyzes the synthesis of cannabigerolic acid (CBGA) from olivetolic acid (OLA) and geranyl pyrophosphate (GPP).

[0161] In C. sativa, a prenyltransferase enzyme catalyzes the synthesis of CBGa from olivetolic acid and GPP. However, the C. sativa prenyltransferase functions poorly in S. cerevisiae, as described in U.S. Pat. No. 8,884,100.

[0162] PT104 was evaluated in this Example, to determine advantages over the C. sativa prenyltransferase when expressed in S. cerevisiae, to catalyze the synthesis of CBGA from OLA and GPP so as to create a consolidated phytocannabinoid producing strain of S. cerevisiae. The S. cerevisiae may also have one or more mutations or modification in genes and metabolic pathways that are involved in OLA and/or GPP production or consumption.

[0163] The modified S. cerevisiae strain may also express genes encoding for Dictyostelium polyketide synthase (DiPKS), a hybrid Type1 FAS-Type 3 PKS from Dictyostelium discoideum (Ghosh et al., 2008) and olivetolic acid cyclase (OAC) from C. sativa (Gagne et al., 2012). DiPKS allows for the direct production of methyl-Olivetol (meOL) from malonyl-coA, a native yeast metabolite. Certain mutants of DiPKS have been identified that lead to the direct production of olivetol (OL) from malonyl-coA (WO2018/148848). OAC has been demonstrated to assist in the production of olivetolic acid when a suitable Type 3 PKS is used.

[0164] The C. sativa cannabis pathway enzymes requires hexanoic acid for the production of OLA. However, hexanoic acid is highly toxic to S. cerevisiae and greatly diminishes its growth phenotype. As a result, when using DiPKS and OAC rather than the C. sativa pathway enzymes, hexanoic acid need not be added to the growth media, which may result in increased growth of the S. cerevisiae cultures and greater production of olivetolic acid. The S. cerevisiae may have over-expression of native acetaldehyde dehydrogenase and expression of a modified version of an acetoacetyl-CoA carboxylase or other genes, the modifications resulting in lowered mitochondrial acetaldehyde catabolism. Lowering mitochondrial acetaldehyde catabolism by diverting the acetaldehyde into acetyl-CoA production increases malonyl-CoA available for synthesizing olivetolic acid.

[0165] FIG. 4 outlines the native biosynthetic pathway for cannabinoid production in Cannabis sativa. Hexanoic acid is converted to hexanoyl-CoA by hexanoyl-CoA synthase (1). Hexanoyl-CoA is used, together with malonyl-CoA as an extender unit, by the olivetolic acid synthase (2) and olivetolic acid cyclase (3) enzymes. This produces olivetolic acid. Olivetolic acid and geranyl pyrophosphate (GPP) are subsequently converted into cannabigerolic acid (CBGa) by a prenyltransferase enzyme (4), such as a geranyl transferase. The prenyl group on CBGa is subsequently cyclized to produce tetrahydrocannabinollic acid (THCa) and cannabidiolic acid (CBDa) with the reactions being catalyzed by the oxidocyclases: tetrahydrocannabinolic acid (THCa) synthase (6) and cannabidiolic acid (CBGa) synthase (5) respectively.

[0166] As expression and functionality of the C. sativa pathway in S. cerevisiae is hindered by problems of toxic precursors and poor expression, this Example utilizes a novel biosynthetic route for cannabinoid production. This route was developed to overcome one or more of the above-described detrimental issues.

[0167] FIG. 5 outlines the pathway of cannabinoid biosynthesis as described herein. A four enzyme system is described. Dictyostelium polyketide synthase (DiPKS) (1), from D. discoideum and olivetolic acid cyclase (OAC) (2) from C, sativa are used to produce olivetolic acid directly from glucose, via acetyl CoA and malonyl CoA. Geranyl pyrophosphate (GPP) from the yeast terpenoid pathway and olivetolic acid (OLA) are subsequently converted to Cannabigerolic acid using a prenyltransferase (3), which in this example is: PT104. Cannabigerolic acid is then further cyclized to produce THCa or CBDa using C. sativa THCa synthase (5) or CBDa synthase (4) enzymes, respectively.

[0168] The prenyltransferase referenced herein as “PT104”, which may interchangeably be referenced as RdPT1, is a daurichromenic acid synthase, an integral membrane protein from Rhododendron dauricum, that has been characterized to convert orsellinic acid and farnesyl pyrophosphate (FPP) to grifolic acid (Saeki et al., 2018).

[0169] FIG. 6 outlines the function of PT104 (d31rdPT1) in the known synthetic pathway to grifolic acid. Grifolic acid is an intermediate in the production of daurichromenic acid, an anti-HIV small molecule. This enzyme was previously characterized to strictly prefer orsellinic acid as the polyketide precursor and farnesyl pyrophosphate as the preferred prenyl donor. However it has been surprisingly found, as described herein, that olivetolic acid and GPP can also be taken as substrates for this enzyme. This leads to advantages for the use of this enzyme in phytocannabionoid synthesis.

[0170] FIG. 7 illustrates synthesis of cannabigorcinic acid starting with malonyl CoA and Acetyl CoA with PKS to form orsellinic acid, which together with GPP and PT104 as described herein results in cannabigorcinic acid.

[0171] This example describes, for the first time, the in vivo production of cannabigerorcinic acid (CBGOa) and CBGa in S. cerevisiae using PT104 as the prenyltransferase.

[0172] Table 4 shows the modifications made to the base strain used in this example to allow olivetolic acid production. The modifications are named, and described with reference to a sequence (SEQ ID NO.), the integration region in the genome, and other details such as the genetic structure of the sequence.

TABLE 4
Modifications to base strain used in Example 1

| | | | Integration | | Genetic |
|---|---|---|---|---|---|
| | | SEQ ID | Region/ | | Structure of |
| # | Name | NO. | Plasmid | Description | Sequence |
| 1 | NpgA | SEQ ID | Flagfeldt Site | Phosphopantetheinyl Transferase from | Site14Up::Tef1p: |
| | | NO. 2 | 14 integration | Aspergillus niger. Accessory Protein for | NpgA:Prm9t: |
| | | | | DiPKS (see Kim et al., 2015) | Site14Down |
| 2 | DiPKS- | SEQ ID | USER Site | Type 1 FAS fused to Type 3 PKS from D. | XII-1up::Gal1p: |
| | 1 | NO. 3 | XII-1 | discoideum. Produces Olivetol from | DiPKSG1516R: |
| | | | integration | malonyl-coA | Prm9t::XII1-down |
| | | | (Jensen et | | |
| | | | al., 2014) | | |
| 3 | DiPKS- | SEQ ID | Wu site 1 | Type 1 FAS fused to Type 3 PKS from D. | Wu1up::Gal1p: |
| | 2 | NO. 4 | integration | discoideum. Produces Olivetol from | DiPKSG1516R: |
| | | | | malonyl-coA | Prm9t::Wu1down |
| 4 | DiPKS- | SEQ ID | Wu site 3 | Type 1 FAS fused to Type 3 PKS from D. | Wu3up::Gal1p: |
| | 3 | NO. 5 | integration | discoideum. Produces Olivetol from | DiPKSG1516 |
| | | | | malonyl-coA | R:Prm9t::Wu3down |
| 5 | DiPKS- | SEQ ID | Wu site 6 | Type 1 FAS fused to Type 3 PKS from D. | Wu6up::Gal1p: |
| | 4 | NO. 6 | integration | discoideum. Produces Olivetol from | DiPKSG1516R: |
| | | | | malonyl-coA | Prm9t::Wu6down |
| 6 | DiPKS- | SEQ ID | Wu site 18 | Type 1 FAS fused to Type 3 PKS from D. | Wu18up::Gal1p: |
| | 5 | NO. 7 | integration | discoideum. Produces Olivetol from | DiPKSG1516R: |
| | | | | malonyl-coA | Prm9t::Wu18down |
| 7 | PDH | SEQ ID | Flagfeldt Site | Acetaldehyde dehydrogenase (ALD6) | 19Up::Tdh3p: |
| | | NO. 8 | 19 integration | from S. cerevisiae and acetoacetyl coA | Ald6:Adh1::Tef1p: |
| | | | | synthase (AscL641P) from Salmonella | seACS1^{L641P}: |
| | | | | enterica. Will allow greater accumulation | Prm9t::19Down |
| | | | | of acetyl-coA in the cell. (Shiba et al., | |
| | | | | 2007) | |
| 8 | Maf1 | SEQ ID | Flagfeldt Site | Maf1 is a regulator of tRNA biosynthesis. | Site5Up::Tef1p: |
| | | NO. 9 | 5 integration | Overexpression in S. cerevisiae has | Maf1:Prm9t: |
| | | | | demonstrated higher monoterpene | Site5Down |
| | | | | (GPP) yields. (Liu et al, 2013) | |
| 9 | Erg20K | SEQ ID | Chromosomal | Mutant of Erg20 protein that diminishes | Tpi1t:ERG20K197E: |
| | 197E | NO. 10 | modification | FPP synthase activity creating greater | Cyc1t::Tef1p: |
| | | | | pool of GPP precursor. Negatively affects | KanMX:Tef1t |
| | | | | growth phenotype (Oswald et al., 2007). | |
| 10 | Erg1p:UB14- | SEQ ID | Flagfeldt Site | Sterol responsive promoter controlling | Site18Up::Erg1p: |
| | Erg20:deg | NO. 11 | 18 integration | Erg20 protein activity. Allows for regular | UB14deg:ERG20: |
| | | | | FPP synthase activity and uninhibited | Adh1t:Site18down |
| | | | | growth phenotype until accumulation of | |
| | | | | sterols which leads to a suppression of | |
| | | | | expression of enzyme. (Peng et al., | |
| | | | | 2018) | |
| 11 | tHMGr- | SEQ ID | USER Site X- | Overexpression of truncated HMGr1 and | X3up::Tdh3p:tHMGR1: |
| | IDI | NO. 12 | 3 integration | IDI1 proteins that have been previously | Adh1t::Tef1p:IDI1: |
| | | | | identified to be bottlenecks in the S. | Prm9t::X3down |
| | | | | cerevisiae terpenoid pathway responsible | |
| | | | | for GPP production. (Ro et al., 2006) | |
| 12 | PGK1p: | SEQ ID | Chromosomal | Mutations in the native S. cerevisiae | Pgk1:ACC1^{S659A, S1157A}: |
| | ACC1^{S659A, S1157A} | NO. 13 | modification | acetyl-coA carboxylase that removes | Acc1t |
| | | | | post-translational modification based | |
| | | | | down-regulation. Leads to greater | |
| | | | | malonyl-coA pools. The promoter of Acc1 | |
| | | | | was also changed to a constitutive | |
| | | | | promoter for higher expression. (Shi et | |
| | | | | al, 2014) | |
| 13 | OAC | SEQ ID | Flagfeldt Site | Plasmid expressing Cannabis sativa | Gal1p:csOAC:Eno2t |
| | | NO. 14 | 16 integration | Olivetolic acid cyclase (OAC) protein that | |
| | | | | allows the production of olivetolic acid. | |

TABLE 5
Plasmid Information

| # | Plasmid Name | Description | Selection |
|---|---|---|---|
| 1 | PLAS250 | pGAL_Gal1p:PT104:Cyc1t | Uracil |
| 2 | PLAS36 | pCAS_Hyg_Rnr2p:Cas9: | Hygromycin |
| | | Cyc1t::tRNATyr:HDV:gRNA:Snr52t | |

[0173] Table 6 lists the strains used in this example, providing the features of the strains including background, plasmids if any, genotype, etc.

TABLE 6
Strains Used

| Strain # | Background | Plasmids | Genotype | Notes |
|---|---|---|---|---|
| HB42 | -URA, -LEU | None | Saccharomyces cerevisiae | Base Strain |
| | | | CEN.PK2; ΔLEU2; ΔURA3; | |
| | | | Erg20K197E::KanMx | |
| HB742 | -URA, -LEU | None | Saccharomyces cerevisiae | Starting |
| | | | CEN.PK2; ΔLEU2; ΔURA3; | strain |
| | | | Erg20K197E::KanMx; ALD6; | |
| | | | ASC1L641P; NPGA; MAF1; | |
| | | | PGK1p:Acc1; tHMGR1; IDI; | |
| | | | DiPKS_G1516R X 5; | |
| | | | ACC1_S659A_S1157A; | |
| | | | UB14p:ERG20 | |
| HB801 | -URA, -LEU | None | Saccharomyces cerevisiae | Olivetolic |
| | | | CEN.PK2; ΔLEU2; ΔURA3; | acid |
| | | | Erg20K197E::KanMx; ALD6; | producing |
| | | | ASC1L641P; NPGA; MAF1; | strain |
| | | | PGK1p:Acc1; tHMGR1; IDI; | |
| | | | DiPKS_G1516R X 5; | |
| | | | ACC1_S659A_S1157A; | |
| | | | UB14p:ERG20; | |
| | | | Gal1p:csOAC | |
| HB887 | -URA, -LEU | PLAS250 | Saccharomyces cerevisiae | CBGa |
| | | | CEN.PK2; ΔLEU2; ΔURA3; | producing |
| | | | Erg20K197E::KanMx; ALD6; | strain |
| | | | ASC1L641P; NPGA; MAF1; | |
| | | | PGK1p:Acc1; tHMGR1; IDI; | |
| | | | DiPKS_G1516R X 5; | |
| | | | ACC1_S659A_S1157A; | |
| | | | UB14p:ERG20; | |
| | | | Gal1p:csOAC | |

[0174] Features and characteristics of sequences noted here are provided in Table 3.

[0175] Materials and Methods

[0176] Genetic Manipulations

[0177] HB42 was used as a base strain to develop all other strains in this example. All DNA was transformed into strains using the Gietz et al. (2014) transformation protocol. Plas 36 was used for the CRISPR-based genetic modifications described in this experiment (Ryan et al., 2016). All plasmids were synthesized by TWIST DNA Sciences.

[0178] The genome of HB42 was iteratively targeted by gRNA's and Cas9 expressed from PLAS36 to make the following genomic modifications in the order shown below in Table 7.

TABLE 7
Genomic Modifications to Base Strain BH42

| Order | Genomic Region | Modification |
|---|---|---|
| 1 | Flagfeldt Site 19 integration | PDH |
| 2 | Flagfeldt Site 14 integration | NpgA |
| 3 | Flagfeldt Site 5 integration | Maf1 |
| 4 | Chromosomal Modification | PGK1p:ACC1^{S659A, S1157A} |
| 5 | USER Site X-3 integration | tHMGR-IDI1 |
| 6 | USER Site XII-2 integration | DiPKS-1 |
| 7 | Flagfeldt Site 18 integration | Erg1p:UB14-Erg20:deg |
| 8 | Wu site 1 integration | DiPKS-2 |
| 9 | Wu site 3 integration | DiPKS-3 |
| 10 | Wu site 6 integration | DiPKS-4 |
| 11 | Wu site 18 integration | DiPKS-5 |

[0179] The result of the above modifications was a S. cerevisiae strain that could produce olivetol directly from glucose and was named “HB742”, as an internal laboratory designation for the purposes of this example.

[0180] The genome at Flagfeldt site 16 (Bai Flagfeldt et al., 2009) in HB742 was subsequently targeted using Cas9 and gRNA expressed from PLAS36 which was transformed into HB742. The donor for the recombination was SEQ ID NO:14. Successful integrations were selected on YPD+200 ug/ml Hygromycin and confirmed by colony PCR. This led to the creation of “HB801” (internal designation) with a galactose inducible csOAC encoding gene integrated into the genome of HB742. The genomic region containing SEQ ID NO:14 was also verified by sequencing to confirm the presence of the csOAC encoding gene. This allowed for the creation of an olivetolic acid producing strain, HB801 (internal designation). PLAS250 which encodes a galactose-inducible gene expressing PT104 was subsequently transformed into HB801 producing a strain that can synthesize cannabigorcinic acid directly from glucose, HB887 (internal designation).

[0181] Strain Growth and Media:

[0182] HB887 was grown on yeast minimal media with a composition of 1.7 g/L YNB without ammonium sulfate+1.96 g/L URA dropout amino acid supplements+1.5 g/L magnesium L-glutamate) with 2% w/v galactose, 2% w/v raffinose, 200 μg/l geneticin, and 200 ug/L ampicillin (Sigma-Aldrich, Canada). This would allow the strain to produce olivetolic acid and cannabigerolic acid and potentially other cannabinoids.

[0183] In another embodiment in this example, HB887 was grown in yeast minimal media with a composition of 1.7 g/L YNB without ammonium sulfate+1.96 g/L URA dropout amino acid supplements+1.5 g/L magnesium L-glutamate) with 2% w/v glucose, 200 μg/l geneticin, and 200 ug/L ampicillin (Sigma-Aldrich Canada). This is a non-inducible condition and the strain would not produce phytocannabinoids.

[0184] In another embodiment in this example, HB887 was grown in yeast minimal media with a composition of 1.7 g/L YNB without ammonium sulfate+1.96 g/L URA dropout amino acid supplements+1.5 g/L magnesium L-glutamate) with 2% w/v glucose, 200 μg/l geneticin, and 200 ug/L ampicillin+100 mg/L Orsellinic acid (Sigma-Aldrich, Canada). This is also a non-inducible condition and would not allow the strain to produce any phytocannabinoids.

[0185] HB887 was grown on yeast minimal media with a composition of 1.7 g/L YNB without ammonium sulfate+1.96 g/L URA dropout amino acid supplements+1.5 g/L magnesium L-glutamate) with 2% w/v galactose, 2% w/v raffinose, 200 μg/l geneticin, and 200 ug/L ampicillin+100 mg/L Orsellinic acid (Sigma-Aldrich Canada). This would allow HB887 to produce both CBGa and CBGOa.

[0186] Experimental Conditions

[0187] 12 single colony replicates of strains were tested in this study. All strains were grown in 1 ml cultures in 96-well deepwell plates. The deepwell plates were incubated at 30° C. and shaken at 250 rpm for 96 hrs.

[0188] Metabolite extraction was performed with 300 μl of Acetonitrile added to 100 μl culture in a new 96-well deepwell plate, followed by 30 min of agitation at 950 rpm. The solutions were then centrifuged at 3750 rpm for 5 min. 200 μl of the soluble layer was removed and stored in a 96-well v-bottom microtiter plate. Samples were stored at −20° C. until analysis.

[0189] Samples were quantified using HPLC-MS analysis.

[0190] CBGa Quantification Protocol

[0191] The quantification of CBGa was performed using HPLC-MS on a Acquity UPLC-TQD MS. The chromatography and MS conditions are described below.

[0192] LC conditions: Column: Hypersil Gold PFP 100×2.1 mm, 1.9 μm particle size; Column temperature: 45° C.; Flow rate: 0.6 ml/min; Eluent A: Water 0.1% formic acid; and Eluent B: Acetontrile 0.1% formic acid.

[0193] Gradient (Time (min) and % B) is expressed as: Time=Initial; 51 (isocratic) and Time=2.50; 51 (isocratic).

[0194] ESI-MS conditions: Capillary: 3 kV; Source temperature: 150° C.; Desolvation gas temperature: 450° C.; Desolvation gas flow (nitrogen): 800 L/hr; and Cone gas flow (nitrogen): 50 L/hr.

[0195] CBGa detection parameters are as follows: Retention time: 1.19 min; Ion [M-H]⁻; Mass (m/z): 359.2; Mode: ES−, SIR; Span: 0; Dwell (s): 0.2; and Cone (V): 30.

[0196] CBGOa Quantification Protocol

[0197] CBGOa was quantified using HPLC-MS on a Waters Acquity TQD. Table 8 lists the CBGOa detection parameters.

TABLE 8
CBGOa Detection Parameters

| | |
|---|---|
| | Waters HSS |
| Column | 1 × 50 mm, 1.8 um |

LC Method

| A1 | Water + 0.1% FA | |
|---|---|---|
| B1 | ACN + 0.1% FA | |
| Flow rate | 0.3 mL/min | |
| | A1 | B2 |
| 0.00 min | 50% | 50% |
| 0.80 min | 15% | 85% |
| 1.00 min | 5% | 95% |
| 1.01 min | 50% | 50% |
| 1.80 min | 50% | 50% |
| | RT (min) | |
| CBGOa | 0.96 min | |

MS Method

| | | | Cone | Collision |
|---|---|---|---|---|
| ES+ | M/Z | Transition | Voltage (V) | (V) |
| CBGOa | 261.2 | → 161.1 | 20 | 12 |

[0198] Results:

[0199] Production of CBGa in S. cerevisiae.

[0200] FIG. 8 illustrates the de-novo CBGa production by HB8887. These data show that CBGa was produced by HB887 directly from glucose and/or primary carbon source when it was grown under the inducible condition as opposed to its growth in the uninducible condition.

[0201] Production of CBGa and CBGOa Simultaneously in S. cerevisiae HB887.

[0202] To test the functionality of this enzyme against both of the polyketides substrates at the same time, HB887 was grown in the inducible condition along with an addition of 100 mg/L of orsellinic acid. It was observed that HB887 was producing both CBGa and CBGOa simultaneously. As this enzyme has a preference for orsellinic acid as a substrate it was more functional at producing CBGOa, however there was quantifiable CBGa production as well.

[0203] FIG. 9 illustrates the de-novo simultaneous production of CBGa and CBGOa by HB8887. These data illustrate that PT104 has the capacity to prenylate orsellinic acid and olivetolic acid.

[0204] Part 2

[0205] ABBA Family Prenyltransferases for Production of Prenylated Polyketides and Phytocannabinoids

[0206] The present disclosure relates generally to prenyltransferases, which may be of an ABBA Family type, useful in production of phytocannabinoids and phytocannabinoid precursors such as polyketides. Cells, such as yeast cells transformed with the ability to prepare such phytocannabinoids or precursors are described.

[0207] Overview

[0208] In one aspect there is provided a method of producing a phytocannabinoid or phytocannabinoid analogue comprising: providing a host cell which produces a polyketide and a prenyl donor; introducing a polynucleotide encoding prenyltransferase (PTase) polypeptide into said host cell; and culturing the host cell under conditions sufficient for PTase polypeptide production to thereby react the PTase with the polyketide and the prenyl donor to produce said phytocannabinoid or phytocannabinoid analogue.

[0209] The recombinant PTase may be one comprising or consisting of an amino acid sequence set forth in SEQ ID NOs: 59 to 97; or having at least 70% identity thereto.

[0210] Further, the recombinant PTase may be one that is encoded by polynucleotide comprising or consisting of: a nucleotide sequence set for forth in SEQ ID NOs: 20 to 58, or a nucleotide sequence having at least 70% identity thereto, or a nucleotide sequence that hybridizes with the complementary strand thereof, or a nucleotide sequence that differs therefrom by one or more nucleotides that are substituted, deleted, and/or inserted; or a derivative thereof.

[0211] An isolated polypeptide is described comprising or consisting of an amino acid sequence set forth in SEQ ID NOs: 59 to 97; or at least 50% 99% identity thereto. Further, an isolated polynucleotide is described comprising a nucleotide sequence set for forth in SEQ ID NOs: 20 to 58 or 100, or having at least 70% identity thereto or a nucleotide sequence that hybridizes with the complementary strand thereof, or which differs therefrom by one or more nucleotides that are substituted, deleted, and/or inserted; or a derivative thereof having prenyltransferase activity. Expression vectors encoding the polypeptide and host cells comprising the polynucleotide or expression vector are described.

### Detailed Description of Part 2

[0212] Generally, there is described herein the production of phyotocannabinoids or phytocannabinoid analogues.

[0213] Phytocannabinoids are a large class of compounds with over 100 different known structures that are produced in the Cannabis sativa plant. These bio-active molecules, such as tetrahydrocannabinol (THC) and cannabidiol (CBD), can be extracted from plant material for medical and recreational purposes.

[0214] Phytocannabinoids are synthesized from polyketide and terpenoid precursors which are derived from two major secondary metabolism pathways in the cell. For example, the C—C bond formation between the polyketide olivetolic acid and the allylic isoprene diphosphate geranyl pyrophosphate (GPP) produces the cannabinoid cannabigerolic acid (CBGa). This reaction type is catalyzed by enzymes known as prenyltransferases (PTases). The Cannabis plant utilizes a membrane-bound PTase to catalyze the addition of the prenyl moiety to olivetolic acid to form CBGa.

[0215] A cytosolic class of PTase that adopt an anti-parallel p/a barrel structure, known as the ABBA family PTs, may be more amenable to heterologous expression in recombinant hosts. The first reported example of this class of PTase was NphB (U.S. Pat. No. 7,361,483 B2, doi:10.1038/nature03668) which demonstrated catalytic activity for the prenylation of olivetol and olivetolic acid.

[0216] Herein, the use of nucleotide and protein sequences for ABBA PTases that demonstrate activity with aromatic acceptor substrates is reported.

[0217] In one aspect, there is a method described of producing a phytocannabinoid or phytocannabinoid analogue, comprising, reacting a recombinant prenyltransferase (PTase) with a polyketide and with a GPP to produce said phytocannabinoid or phytocannabinoid analogue.

[0218] In one aspect there is described a method of producing cannabigorcinic acid (CBGOa), comprising: providing a host cell which produces orsellinic acid; introducing a polynucleotide encoding prenyltransferase (PTase) polypeptide into said host cell, culturing the host cell under conditions sufficient for PTase polypeptide production.

[0219] In one aspect there is described a method of producing cannabigorcinic acid (CBGOa), comprising: introducing a polynucleotide encoding prenyltransferase (PTase) polypeptide into a host cell which produces orsellinic acid, culturing the host cell under conditions sufficient for PTase polypeptide production.

[0220] In one aspect there is described a method of producing cannabigorcinic acid (CBGOa), comprising: culturing a host cell which produces orsellinic acid and comprises or consists of a polynucleotide encoding prenyltransferase (PTase) polypeptide under conditions sufficient for PTase polypeptide production.

[0221] In some example of the method herein, the phytocannabinoid produced is cannabigerol (CBG), cannabigerolic acid (CBGa), cannabigerovarin (CBGv), cannabigerovarinic acid (CBGva), cannabigerocin (CBGo), or cannabigerocinic acid (CBGoa).

[0222] In some example of the method herein, the polyketide is olivetol, olivetolic acid, divarin, divarinic acid, orcinol, or orsellinic acid.

[0223] In some example of the method herein, when said polyketide is olivetol then said phytocannabinoid is cannabigerol (CBG), when said polyketide is olivetolic acid then said phytocannabinoid is cannabigerolic acid (CBGa), when said polyketide is divarin then said phytocannabinoid is cannabigerovarin (CBGv), when said polyketide is divarinic acid then said phytocannabinoid is cannabigerovarinic acid (CBGva), when said polyketide is orcinol then said phytocannabinoid is cannabigerocin (CBGo), when said polyketide is orsellinic acid then said phytocannabinoid is cannabigerocinic acid (CBGoa).

[0224] In one example, said polyketide is:

[chemical structure]

[chemical structure]

[0225] In one example, said prenyl donor is:

[chemical structure]

[0226] In one example, said phytocannabinoid or phytocannabinoid analogue is:

[chemical structure]

[0227] In one example, said recombinant PTase comprising or consisting of an amino acid sequence set for in SEQ ID NOs: 59 to 97; or at least 50%, at least 60%, at least 70%, at least 80%, at least 90% identity with the amino acid sequence set forth in SEQ ID NOs: 59 to 97; and/or 100% identity with the amino acid sequence set forth in SEQ ID NOs: 59 to 97.

[0228] In one example, said recombinant PTase comprises or consists of the following consensus sequence according to SEQ ID NO:118:

xxxxxxxxxxxxxxxxxxxxxxxxxxxxxxxxxxxxxxxxxxxxxxxxxx
xxxxxxxxxxxxxxxxxxxxxxxxxxxxxxxxMSxxSELDELYSAIEESA
RLLDVxCSRDKVxPVLTAYGDxxAxxxxVIAFRVxTxxRxxGELDYRFxx
xPxxxDPYxxALSNGLIxETDHPxxxxxVGSLLSDIRERxPIxSYGxxxx
IDEGVVGGFKKIWxFFPxDxMQxVSELAEIPSMPxSLADHxDxFARHGLx
DKVxLIGIDYxxKTVNVYFxxLxAExxExExxxVxSMLRELGLPEPSDQM
LxLxxKAFxIYxTxSWDSPRIERLCFxVxTxxxxDPxxLPxxxVxIEPxI
EKFxxxVxxVPYxxxGxxRRFVxYAxxxSPExGEYYKLxSYYQxxPxxLD
xMxxxxxxxxxxxxxxxxxxxxxxxxxxxxxxxx.

[0229] In one example, said recombinant PTase is encoded by polynucleotide comprising or consisting of: a) a nucleotide sequence set for forth in SEQ ID NOs: 20 to 58; b) a nucleotide sequence having at least 70% identity to the nucleic acid of a), c) a nucleotide sequence that hybridizes with the complementary strand of the nucleic acid of a), d) a nucleotide sequence that differs from a) by one or more nucleotides that are substituted, deleted, and/or inserted; or e) a derivative of a), b), c), or d). For example, in c) said polynucleotide hybridizes with the complementary strand of the nucleic acid of a) under conditions of high stringency. Further, the polynucleotide may be a nucleotide sequence that differs from a) by one or more nucleotides that are substituted, deleted, and/or inserted.

[0230] In one example, in step (b) said polynucleotide has at least 70%, 71%, 72%, 73%, 74%, 75%, 76%, 77%, 78%, 79%, 80%, 81%, 82%, 83%, 84%, 85%, 86%, 87%, 88%, 89%, 90%, 91%, 92%, 93%, 94%, 95%, 96%, 97%, 98%, or 99% sequence identity.

[0231] In one example, said polyketide is olivetol, olivetolic acid, divarin, divarinic acid, orcinol, or orsellinic acid.

[0232] The host cell can be a bacterial cell, a fungal cell, a protist cell, or a plant cell, such as any of the exemplary cell types noted herein in Table 2. Exemplary host cell types include S. cerevisiae, E. coli, Yarrowia lipolytica, and Komagataella phaffii.

[0233] In one aspect there is provided an isolated polypeptide comprising or consisting of an amino acid sequence set for in SEQ ID NOs: 59 to 97; or at least 50%, 60%, 70%, 80%, or 90% identity with the amino acid sequence set forth in SEQ ID NOs: 59 to 97, or has 100% identity with the amino acid sequence set forth in SEQ ID NOs: 59 to 97.

[0234] In one aspect there is provided an isolated polynucleotide molecule comprising: a) a nucleotide sequence set for forth in SEQ ID NOs: 20 to 58; b) a nucleotide sequence having at least 70% identity to the nucleotide sequence of a), c) a nucleotide sequence that hybridizes with the complementary strand of the nucleic acid of a), d) a nucleotide sequence that differs from a) by one or more nucleotides that are substituted, deleted, and/or inserted; or e) a derivative of a), b), c), or d). For example, in c) said polynucleotide may hybridize with the complementary strand of the nucleic acid of a) under conditions of high stringency. Further, an exemplary nucleic acid may be one that differs from a) by one or more nucleotides that are substituted, deleted, and/or inserted.

[0235] In one example, b) said polynucleotide has at least 70%, 71%, 72%, 73%, 74%, 75%, 76%, 77%, 78%, 79%, 80%, 81%, 82%, 83%, 84%, 85%, 86%, 87%, 88%, 89%, 90%, 91%, 92%, 93%, 94%, 95%, 96%, 97%, 98%, or 99% sequence identity.

[0236] In one aspect there is provided an expression vector comprising the isolated polynucleotide molecule described above.

[0237] In one aspect there is provided a host cell comprising the polynucleotide as described, or the expression vector.

[0238] The host cell can be a bacterial cell, a fungal cell, a protist cell, or a plant cell, such as any of the exemplary cell types noted herein in Table 2. Exemplary host cell types include S. cerevisiae, E. coli, Yarrowia lipolytica, and Komagataella phaffii.

[0239] In one example, said host cell may comprise genetic modification that increase the available pool of terpenes and malonyl-coA in the cell.

[0240] In one example, said host cell may comprise genetic modification that increase the available pool of terpenes, malonyl-coA, and a phosphopantetheinyl transferase, in the cell.

[0241] In one example, said genetic modifications comprise or consist of tHMGr-IDI (SEQ ID NO: 105) and/or PGK1p:ACC^{1S659A,S1157A} (SEQ ID NO: 106).

[0242] In one example, said genetic modifications comprise of consist of tHMGr-IDI (SEQ ID NO: 105), PGK1p:ACC^{1S659A,S1157A} (SEQ ID NO: 106), and Erg20K197E (SEQ ID NO: 104).

[0243] In one example, said genetic modifications comprise or consist of PGK1p:ACC^{1S659A,S1157A} (SEQ ID NO: 108) and OAS2 (SEQ ID NO: 99).

[0244] In one example, said host cell further comprises NpgA from Aspergillus niger.

[0245] In one example, said host cell is a from S. cerevisiae. For example, said S. cerevisiae, comprises NpgA (SEQ ID NO: 101), PDH (SEQ ID NO: 102), Maf1 (SEQ ID NO: 103), Erg20K197E (SEQ ID NO: 104), tHMGr-IDI (SEQ ID NO: 105), PGK1p:ACC^{1S659A,S1157A}(SEQ ID NO: 106), OAS2 (SEQ ID NO: 99).

[0246] In one example, said polynucleotide encoding a PTase comprises or consists of PT161 (SEQ ID NO: 100). In one example, said polynucleotide encoding a PTase comprises or consists of: a) a nucleotide sequence as set forth in PT161 (SEQ ID NO: 100); b) a nucleic acid having at least 70% identity to the nucleic acid of a), c) a nucleic acid that hybridizes with the complementary strand of the nucleic acid of a), d) a nucleic acid that differs from a) by one or more nucleotides that are substituted, deleted, and/or inserted; or e) a derivative of a), b), c), or d). Said polynucleotide may be one having at least 70%, 71%, 72%, 73%, 74%, 75%, 76%, 77%, 78%, 79%, 80%, 81%, 82%, 83%, 84%, 85%, 86%, 87%, 88%, 89%, 90%, 91%, 92%, 93%, 94%, 95%, 96%, 97%, 98%, or 99% sequence identity to b), while maintaining PTase activity. In c) said polynucleotide may hybridizes with the complementary strand of the nucleic acid of a) under conditions of high stringency. The nucleic acid that differs from a) by one or more nucleotides that are substituted, deleted, and/or inserted.

[0247] In one aspect there is provided a method of producing orsellinic acid in a host cell, comprising: introducing a polynucleotide encoding OAS2 from Sparassis crispa into said host cell; and culturing the host cell under conditions sufficient for OAS2 polypeptide production.

[0248] In one aspect there is provided a method of producing orsellinic acid in a host cell, comprising: culturing a host cell which comprises or consists of a polynucleotide encoding OAS2 from Sparassis crispa under conditions sufficient for OAS2 polypeptide production.

[0249] The host cell can be a bacterial cell, a fungal cell, a protist cell, or a plant cell, such as any of the exemplary cell types noted herein in Table 2. Exemplary host cell types include S. cerevisiae, E. coli, Yarrowia lipolytica, and Komagataella phaffii.

[0250] In one example, said polynucleotide encoding OAS2 from Sparassis crispa comprises or consists of: a) a nucleotide sequence set for forth in SEQ ID NO: 99; b) a nucleotide sequence having at least 70% identity to the nucleic acid of a); c) a nucleotide sequence that hybridizes with the complementary strand of the nucleic acid of a); d) a nucleotide sequence that differs from a) by one or more nucleotides that are substituted, deleted, and/or inserted; or e) a derivative of a), b), c), or d). In b) said polynucleotide may have at least 70%, 71%, 72%, 73%, 74%, 75%, 76%, 77%, 78%, 79%, 80%, 81%, 82%, 83%, 84%, 85%, 86%, 87%, 88%, 89%, 90%, 91%, 92%, 93%, 94%, 95%, 96%, 97%, 98%, or 99% sequence identity. In c), said polynucleotide hybridizes with the complementary strand of the nucleic acid of a) under conditions of high stringency. For example, said polynucleotide may be a nucleotide sequence that differs from a) by one or more nucleotides that are substituted, deleted, and/or inserted.

[0251] In one aspect there is provided a kit comprising: an isolated polynucleotide molecule comprising: a) a nucleotide sequence set for forth in SEQ ID NOs: 20 to 58; b) a nucleotide sequence having at least 70% identity to the nucleotide sequence of a); c) a nucleotide sequence that hybridizes with the complementary strand of the nucleic acid of a); d) a nucleotide sequence that differs from a) by one or more nucleotides that are substituted, deleted, and/or inserted; or e) a derivative of a), b), c), or d); and optionally a container and/or instructions for the use thereof.

[0252] In one example, the kit may further comprise an expression vector comprising the isolated polynucleotide molecule described above.

[0253] In one example, the kit may further comprise a host cell comprising a polynucleotide described above, or the expression vector described above. Exemplary host cell types include S. cerevisiae, E. coli, Yarrowia lipolytica, and Komagataella phaffii.

[0254] Reference is made to Table 1, above, which provides a list of polyketides, prenyl donors and prenylated polyketides which may be used or produced herein.

[0255] FIG. 10 depicts a generalize scheme for the use of the prenyltransferases described herein to attach a prenyl moiety to aromatic polyketides to produce prenylated polyketides.

[0256] FIG. 11 depicts a specific example in the production of cannabinoids.

[0257] FIG. 12 depicts a pathway for production of Cannabigorcinic acid in S. cerevisiae.

[0258] As presented above, Table 2 lists additional specific examples of model organisms that may be used as host cells.

[0259] Method of the invention are conveniently practiced by providing the compounds and/or compositions used in such method in the form of a kit. Such kit preferably contains the composition. Such a kit preferably contains instructions for the use thereof.

[0260] To gain a better understanding of the invention described herein, the following examples are set forth. It should be understood that these examples are for illustrative purposes only. Therefore, they should not limit the scope of this invention in anyway.

### EXAMPLES—PART 2

### Example 2

[0261] Functional demonstration of Prenyltransferases for the production of prenylated polyketides. A cytosolic class of PTase that adopt an anti-parallel p/a barrel structure, known as the ABBA family PTs, may be more amenable to heterologous expression in recombinant hosts. The first reported example of this class of PTase was NphB (U.S. Pat. No. 7,361,483 B2, doi:10.1038/nature03668) which demonstrated catalytic activity for the prenylation of olivetol and olivetolic acid. Herein, we report the nucleotide and protein sequences for ABBA PTases that demonstrate activity with aromatic acceptor substrates.

[0262] Materials and Methods

[0263] Plasmid Construction: All plasmids were synthesized by Twist DNA sciences. SEQ ID NO. 20 to SEQ ID NO.58 were synthesized in the pET21D+ vector (SEQ ID NO.19) between base-pair 5209 and 5210.

[0264] Upon receiving the DNA from Twist DNA sciences, 100 ng of each vector was transformed into E. coli BL21 (DE3) gold chemically competent cells. The cells were plated on LB Agar plates with 75 mg/L Ampicillin as the selective agent. Successful, isolated colonies were picked by hand and inoculated into 1 ml of LB media containing 75 mg/L ampicillin in 96-well sterile deep well plates. The plates were grown for 16 hours at 37 C while being shaken at 250 RPM. After 16 hours 150 ul of each culture was transferred to a sterile microtiter plate containing 150 ul of 50% glycerol. The microtiter plates were sealed and stored at −80 C as a cell stock.

[0265] SOP for feeding assay: E. coli BL21(DE3) Gold harbouring a plasmid containing a coding sequence for the PTases stored as a cell stock were inoculated into 1 mL cultures of TB Overnight Express autoinduction media containing 75 mg/L ampicillin in sterile 96-well 2 mL deep well plates. The cultures were grown overnight at 30 degrees celsius with shaking at 950 rpm. The following day the cells were harvested by centrifugation and frozen at −20 degrees celsius. The thawed pellets were resuspended in 50 mM HEPES buffer (pH 7.5) with 10 mg/mL lysozyme, 2 U/mL benzonase, and 1× protease inhibitors. The suspension was incubated at 37 degrees celsius for 1 hour with shaking. Following lysis, the cell debris removed by centrifugation. The clarified lysate was collected and incubated with 5 mM polyketide (Olivetol, Olivetolic acid, divarinic acid, orcinol, orsellinic acid), 1.3 mM GPP in 50 mM HEPES buffer, 5 mM MgCL₂, pH 7.5, 0.4% Tween-80 to a final reaction volume of 50 uL. The reaction was incubated at 30 degrees for 24 hours.

[0266] After 24 hours 200 ul of Acetonitrile was added to the reaction and the mixture was centrifuged at 3750 RPM for 10 minutes. 150 ul of the supernatant was then transferred to another microtiter plate, sealed and stored for analysis.

[0267] Quantification and Analysis. The analysis was performed using a Waters UPLC chromatography system connected to a Waters TQD mass spectrometer. The separation was performed on an Acquity UPLC HSS C18 (30 mm×2.1 mm×1.8 um) using a reverse-phased method using Water+0.1% Formic Acid as solvent A and Methanol+0.1% Formic acid as solvent B at a flow rate of 0.8 ml/min. The gradient profile used to isolate CBG is as follows:

TABLE 9
Gradient

| | A | B |
|---|---|---|
| 0.00 min | 40% | 60% |
| 0.20 min | 40% | 60% |
| 0.55 min | 15% | 85% |
| 0.65 min | 15% | 85% |
| 0.66 min | 40% | 60% |
| 1.00 min | 40% | 60% |

[0268] The mass spectrometry is performed using an ESI source in positive mode with a cone voltage of 24V and a collision voltage of 21V for the fragmentation. The mass transitions used to characterize CBG was 317.2 to 192.9.

TABLE 10
LC-MS/MS Conditions

| CBGV-CBGO LC-MS/MS Method | | | | |
|---|---|---|---|---|
| | Acquity UPLC | | | |
| | HSS C18 (30 mm × | | | |
| Column | 2.1 mm × 1.8 um) | | | |
| LC Method | | | | |
| A1 | Water + 0.1% FA | | | |
| B1 | ACN + 0.1% FA | | | |
| Flow rate | 0.3 mL/min | | | |
| | A1 | B2 | | |
| 0.00 min | 50% | 50% | | |
| 0.80 min | 15% | 85% | | |
| 1.00 min | 5% | 95% | | |
| 1.01 min | 50% | 50% | | |
| 1.80 min | 50% | 50% | | |
| | RT (min) | | | |
| CBGO | 0.75 min | | | |
| CBGV | 0.91 min | | | |
| Ibuprofen | 0.64 min | | | |
| MS Method | | | | |
| | | | Cone | Collision |
| ES+ | M/Z | Transition | Voltage (V) | (V) |
| CBGO | 261.2 | → 161.1 | 20 | 12 |
| CBGV | 289.2 | → 164.9 | 20 | 12 |

TABLE 11
Method for CBGOa and CBGVa

| | Waters HSS | | | |
|---|---|---|---|---|
| Column | 1 × 50 mm, 1.8 um | | | |
| LC Method | | | | |
| A1 | Water + 0.1% FA | | | |
| B1 | ACN + 0.1% FA | | | |
| Flow rate | 0.3 mL/min | | | |
| | A1 | B2 | | |
| 0.00 min | 50% | 50% | | |
| 0.80 min | 15% | 85% | | |
| 1.00 min | 5% | 95% | | |
| 1.01 min | 50% | 50% | | |
| 1.80 min | 50% | 50% | | |
| | RT (min) | | | |
| CBGOa | 0.96 min | | | |
| CBGVa | 0.75 min | | | |
| MS Method | | | | |
| | | | Cone | Collision |
| ES+ | M/Z | Transition | Voltage (V) | (V) |
| CBGOa | 261.2 | → 161.1 | 20 | 12 |
| CBGVa | 303.2 | | 30 | |

[0269] Method for CBGa: LC conditions. Column: Hypersil Gold PFP 100×2.1 mm, 1.9 μm particle size. Column temperature: 45° C. Flow rate: 0.6 ml/min. Eluent A: Water 0.1% formic acid. Eluent B: Acetontrile 0.1% formic acid.

TABLE 12
Gradient

| Time (min) | % B | |
|---|---|---|
| Initial | 51 | Isocratic |
| 2.50 | 51 | |

[0270] ESI-MS conditions. Capillary: 3 kV. Source temperature: 150° C. Desolvation gas temperature: 450° C. Desolvation gas flow (nitrogen): 800 L/hr. Cone gas flow (nitrogen): 50 L/hr.

TABLE 13
Detection Parameters

| | CBGa |
|---|---|
| Retention time | 1.19 min |
| Ion | [M − H]⁻ |
| Mass (m/z) | 359.2 |
| Mode | ES−, SIR |
| Span | 0 |
| Dwell (s) | 0.2 |
| Cone (V) | 30 |

[0271] Sequences

[0272] Table 14 outlines the sequences used in this example.

TABLE 14
SEQUENCE ID NO TABLE

| SEQ ID NO: | Description | DNA/Protein | Sequence |
|---|---|---|---|
| SEQ ID NO: 19 | pET21d(+) | DNA | enclosed |
| | Empty Vector | | |
| SEQ ID NO: 20 | PT12 | DNA | enclosed |
| SEQ ID NO: 21 | PT 20 | DNA | enclosed |
| SEQ ID NO: 22 | PT 24 | DNA | enclosed |
| SEQ ID NO: 23 | PT 26 | DNA | enclosed |
| SEQ ID NO: 24 | PT 32 | DNA | enclosed |
| SEQ ID NO: 25 | PT 39 | DNA | enclosed |
| SEQ ID NO: 26 | PT 42 | DNA | enclosed |
| SEQ ID NO: 27 | PT 45 | DNA | enclosed |
| SEQ ID NO: 28 | PT 47 | DNA | enclosed |
| SEQ ID NO: 29 | PT 48 | DNA | enclosed |
| SEQ ID NO: 30 | PT 49 | DNA | enclosed |
| SEQ ID NO: 31 | PT 50 | DNA | enclosed |
| SEQ ID NO: 32 | PT 55 | DNA | enclosed |
| SEQ ID NO: 33 | PT 58 | DNA | enclosed |
| SEQ ID NO: 34 | PT 62 | DNA | enclosed |
| SEQ ID NO: 35 | PT 69 | DNA | enclosed |
| SEQ ID NO: 36 | PT 83 | DNA | enclosed |
| SEQ ID NO: 37 | PT 117 | DNA | enclosed |
| SEQ ID NO: 38 | PT 118 | DNA | enclosed |
| SEQ ID NO: 39 | PT 129 | DNA | enclosed |
| SEQ ID NO: 40 | PT 131 | DNA | enclosed |
| SEQ ID NO: 41 | PT 150 | DNA | enclosed |
| SEQ ID NO: 42 | PT 151 | DNA | enclosed |
| SEQ ID NO: 43 | PT 161 | DNA | enclosed |
| SEQ ID NO: 44 | PT 167 | DNA | enclosed |
| SEQ ID NO: 45 | PT 187 | DNA | enclosed |
| SEQ ID NO: 46 | PT 188 | DNA | enclosed |
| SEQ ID NO: 47 | PT 199 | DNA | enclosed |
| SEQ ID NO: 48 | PT 207 | DNA | enclosed |
| SEQ ID NO: 49 | PT 209 | DNA | enclosed |
| SEQ ID NO: 50 | PT 211 | DNA | enclosed |
| SEQ ID NO: 51 | PT 213 | DNA | enclosed |
| SEQ ID NO: 52 | PT 214 | DNA | enclosed |
| SEQ ID NO: 53 | PT 216 | DNA | enclosed |
| SEQ ID NO: 54 | PT 234 | DNA | enclosed |
| SEQ ID NO: 55 | PT 239 | DNA | enclosed |
| SEQ ID NO: 56 | PT 245 | DNA | enclosed |
| SEQ ID NO: 57 | PT 249 | DNA | enclosed |
| SEQ ID NO: 58 | PT 251 | DNA | enclosed |
| SEQ ID NO: 59 | PT12 | Protein | enclosed |
| SEQ ID NO: 60 | PT20 | Protein | enclosed |
| SEQ ID NO: 61 | PT24 | Protein | enclosed |
| SEQ ID NO: 62 | PT26 | Protein | enclosed |
| SEQ ID NO: 63 | PT32 | Protein | enclosed |
| SEQ ID NO: 64 | PT39 | Protein | enclosed |
| SEQ ID NO: 65 | PT42 | Protein | enclosed |
| SEQ ID NO: 66 | PT45 | Protein | enclosed |
| SEQ ID NO: 67 | PT47 | Protein | enclosed |
| SEQ ID NO: 68 | PT48 | Protein | enclosed |
| SEQ ID NO: 69 | PT49 | Protein | enclosed |
| SEQ ID NO: 70 | PT50 | Protein | enclosed |
| SEQ ID NO: 71 | PT55 | Protein | enclosed |
| SEQ ID NO: 72 | PT58 | Protein | enclosed |
| SEQ ID NO: 73 | PT62 | Protein | enclosed |
| SEQ ID NO: 74 | PT69 | Protein | enclosed |
| SEQ ID NO: 75 | PT83 | Protein | enclosed |
| SEQ ID NO: 76 | PT117 | Protein | enclosed |
| SEQ ID NO: 77 | PT118 | Protein | enclosed |
| SEQ ID NO: 78 | PT129 | Protein | enclosed |
| SEQ ID NO: 79 | PT131 | Protein | enclosed |
| SEQ ID NO: 80 | PT150 | Protein | enclosed |
| SEQ ID NO: 81 | PT151 | Protein | enclosed |
| SEQ ID NO: 82 | PT161 | Protein | enclosed |
| SEQ ID NO: 83 | PT167 | Protein | enclosed |
| SEQ ID NO: 84 | PT187 | Protein | enclosed |
| SEQ ID NO: 85 | PT188 | Protein | enclosed |
| SEQ ID NO: 86 | PT199 | Protein | enclosed |
| SEQ ID NO: 87 | PT207 | Protein | enclosed |
| SEQ ID NO: 88 | PT209 | Protein | enclosed |
| SEQ ID NO: 89 | PT211 | Protein | enclosed |
| SEQ ID NO: 90 | PT213 | Protein | enclosed |
| SEQ ID NO: 91 | PT214 | Protein | enclosed |
| SEQ ID NO: 92 | PT216 | Protein | enclosed |
| SEQ ID NO: 93 | PT234 | Protein | enclosed |
| SEQ ID NO: 94 | PT239 | Protein | enclosed |
| SEQ ID NO: 95 | PT245 | Protein | enclosed |
| SEQ ID NO: 96 | PT249 | Protein | enclosed |
| SEQ ID NO: 97 | PT251 | Protein | enclosed |

[0273] In one example, the consensus sequence for the PTs is that of SEQ ID NO:118, where X (or Xaa) residues represent “any amino acid”.

[0274] Table 15 lists the CBG peak areas from PTs.

TABLE 15
CBG peak areas from PTs

| PT# | CBG Peak Area | SD |
|---|---|---|
| PT49 | 6653 | 1786 |
| PT50 | 14865 | 1231 |
| PT48 | 1884 | 388 |
| PT151 | 1457 | 324 |
| PT211 | 628 | 361 |
| PT161 | 148 | 72 |
| PT129 | 1361 | 922 |

[0275] Table 16 lists CBGa production from PTs.

TABLE 16
CBGa production from PTs

| PT# | CBGa Peak Area | SD |
|---|---|---|
| PT42 | 42.7 | 3.1 |
| PT69 | 80.7 | 7.2 |
| PT12 | 41.3 | 5.3 |
| PT131 | 106.2 | 22.8 |
| PT117 | 67.9 | 15.4 |
| PT167 | 33.5 | 9.5 |
| PT118 | 132.3 | 8.8 |
| PT129 | 123.4 | 19.1 |
| PT188 | 78.8 | 12.5 |
| PT216 | 59.2 | 2.4 |
| PT211 | 432.4 | 52.1 |

[0276] Table 17 shows the CBGOa production from PTs.

TABLE 17
CBGOa production from PTs

| PT# | CBGOa Peak Area |
|---|---|
| PT46 | 2084.4 |
| PT24 | 2388.8 |
| PT83 | 2851.3 |
| PT26 | 2261.1 |
| PT79 | 2981.696 |
| PT82 | 3518.176 |
| PT80 | 3450.624 |
| PT167 | 3306.403 |
| PT161 | 3258.422 |

[0277] Table 18 lists the CBGVa production from PTs.

TABLE 18
CBGVa production from PTs

| PT# | CBGVa Peak Area |
|---|---|
| PT82 | 2261.838 |
| PT80 | 1149.23 |
| PT150 | 3145.72 |
| PT118 | 2004.75 |
| PT126 | 1807.25 |
| PT151 | 3412.72 |
| PT211 | 6881.75 |
| PT129 | 1741.61 |
| PT189 | 2381.57 |

[0278] Table 19 lists the CBGO production from PTs.

TABLE 19
CBGO production from PTs

| PT# | CBGO Peak Area |
|---|---|
| PT82 | 27200.37 |
| PT80 | 19279.32 |
| PT83 | 27251.37 |
| PT89 | 111341.5 |
| PT10 | 40805.17 |

### Example 3

[0279] In Vivo Production of Cannabigorcinic Acid (CBGOa)

[0280] This example describes the production of CBGOa in vivo in a Saccharomyces cerevisiae cannabinoid production strain using PT161. The strain contains genetic modifications allowing it to produce the polyketide precursor, Orsellinic acid (ORA) and the monoterpene precursor geranyl pyrophosphate (GPP). The strains in this experiment are listed in Table 20.

TABLE 20
Strains Used in Example 3

| Strain # | Background | Plasmids | Genotype | Notes |
|---|---|---|---|---|
| HB144 | -URA, -LEU | None | Saccharomyces cerevisiae | Base Strain |
| | | | CEN.PK2; ΔLEU2; ΔURA3; | |
| | | | Erg20K197E::KanMx; ALD6; | |
| | | | ASC1^{L641P}; NPGA; MAF1; | |
| | | | PGK1p:ACC1^{S659A, S1157A}; | |
| | | | tHMGR1; ID | |
| HB837 | -URA, -LEU | None | Saccharomyces cerevisiae | Orsellinic |
| | | | CEN.PK2; ΔLEU2; ΔURA3; | Acid |
| | | | Erg20K197E::KanMx; ALD6; | producing |
| | | | ASC1^{L641P}; NPGA; MAF1; | strain |
| | | | PGK1p:ACC1^{S659A, S1157A}; | |
| | | | tHMGR1; ID; OAS2:UserX-4 | |
| HB837 + | -URA, -LEU | PLAS246 | Saccharomyces cerevisiae | CBGOa |
| PLAS246 | | | CEN.PK2; ΔLEU2; ΔURA3; | producing |
| | | | Erg20K197E::KanMx; ALD6; | strain |
| | | | ASC1^{L641P}; NPGA; MAF1; | |
| | | | PGK1p:ACC1^{S659A, S1157A}; | |
| | | | tHMGR1; ID; OAS2:UserX-4 | |

[0281] A list and description of modifications to base strain is present in Table 21.

TABLE 21
Modifications to Base Strain

| | | | Integration | | |
|---|---|---|---|---|---|
| | Modification | SEQ ID | Region/ | | Genetic Structure of |
| # | name | NO. | Plasmid | Description | Sequence |
| 1 | NpgA | SEQ: | Flagfeldt Site | Phosphopantetheinyl Transferase | Site14Up::Tef1p: |
| | | 101 | 14 | from Aspergillus niger [10]. | NpgA:Prm9t: |
| | | | integration[9] | Accessory Protein for PKS's. | Site14Down |
| | | | | Necessary for OAS2 function. | |
| 2 | PDH | SEQ: | Flagfeldt Site | Acetaldehyde dehydrogenase | 19Up::Tdh3p:Ald6: |
| | | 102 | 19 integralion | (ALD6) from S. cerevisiae and | Adh1::Tef1p:seACS1 [symbol] : |
| | | | | acetoacetyl coA synthase | Prm9t::19Down |
| | | | | (AscL641P) from Salmonella | |
| | | | | enterica. Will allow greater | |
| | | | | accumulation of acetyl-coA in the | |
| | | | | cell. | |
| 3 | Maf1 | SEQ: | Flagfeldt Site | Maf1 is a regulator of tRNA | Site5Up::Tef1p: |
| | | 103 | 5 integration | biosynthesis. Overexpression in S. | Maf1:Prm9t: |
| | | | | cerevisiae has demonstrated | Site5Down |
| | | | | higher monolerpene (GPP) yields. | |
| 4 | Erg20K197E | SEQ: | Chromosomal | Mutant of Erg20 protein that | Tpi1t:ERG20K197E: |
| | | 104 | modification | diminishes FPP synthase activity | Cyc1t::Tef1p:KanMX: |
| | | | | creating greater pool of GPP | Tef1t |
| | | | | precursor. Negatively affects | |
| | | | | growth phenotype. | |
| 5 | tHMGr-IDI | SEQ: | USER Site X- | Overexpression of truncated | X3up::Tdh3p:tHMGR1: |
| | | 105 | 3 integration | HMGr1 and IDI1 proteins that have | Adh1t::Tef1p:IDI1: |
| | | | | been previously identified to be | Prm9t::X3down |
| | | | | bottlenecks in the S. cerevisiae | |
| | | | | terpenoid pathway responsible for | |
| | | | | GPP production. | |
| 6 | PGK1p: | SEQ: | Chromosomal | Mutations in the native S. | Pgk1:ACC1 [symbol] : |
| | ACC1 [symbol] | 106 | modification | cerevisiae acetyl-coA carboxylase | Acc1t |
| | | | | that removes post-translational | |
| | | | | modification based down- | |
| | | | | regulation. Leads to greater | |
| | | | | malonyl-coA pools. The promoter | |
| | | | | of Acc1 was also changed to a | |
| | | | | constitutive promoter for higher | |
| | | | | expression. | |

[symbol]

indicates data missing or illegible when filed

[0282] A list of plasmids is presented in Table 22.

TABLE 22
List of Plasmids

| # | Plasmid Name | Description | Selection |
|---|---|---|---|
| 1 | PLAS246 | pGAL_Gal1p:PT161:Cyc1t | Uracil |
| 2 | PLAS36 | pCAS_Hyg_Rnr2p:Cas9: | Hygromycin |
| | | Cyc1t::tRNATyr:HDV:gRNA:Snr52t | |

[0283] A list of Sequences is presented in Table 23.

TABLE 23
Sequences

| | | | Length of | Position of |
|---|---|---|---|---|
| SEQ ID NO: | Description | DNA/Protein | sequence | coding sequence |
| SEQ ID | Protein sequence for | Protein | 2098 | all |
| NO. 98 | OAS2 (Orsellinic acid | | | |
| | synthase) Type 1 PKS | | | |
| SEQ ID | Genomic integration of | DNA | 7717 | 728-7024 |
| NO. 99 | OAS2 into USER site X-4 | | | |
| SEQ ID | PLAS246, pGAL_URA | DNA | 6703 | 3019-3936 |
| NO. 100 | plasmid coding for gene | | | |
| | expressing PT161 | | | |
| SEQ ID | NpgA integrated in | DNA | 3564 | 1170-2201 |
| NO. 101 | Flagfelt Site 14 | | | |
| SEQ ID | PDH bypass integrated | DNA | 7114 | Ald6: 1444-2949 |
| NO. 102 | in Flagfelt Site 19 | | | ACS: 3888-5843 |
| SEQ ID | Maf1 integrated in | DNA | 3256 | 936-2123 |
| NO. 103 | Flagfelt Site 5 | | | |
| SEQ ID | Erg20K197E | DNA | 4254 | 2683-3423 |
| NO. 104 | | | | |
| SEQ ID | tHMGr-IDI integrated in | DNA | 4843 | tHMGR1: 877-2385 |
| NO. 105 | User Site X11-2 | | | IDI1: 3209-4075 |
| SEQ ID | PGK1p:ACC1^{S659A, S1157A} | DNA | 7673 | Pgk1p: 222-971 |
| NO. 106 | | | | Acc1mut: 972-7673 |
| SEQ ID | PLAS36 | DNA | 8980 | |
| NO. 107 | | | | |
| SEQ ID | PLAS414; PLAS250; | DNA or PRO | Various | |
| NO: | PT161; PT245; | | | |
| 108-117 | PLAS250; PLAS44; | | | |
| | PLAS400; PLAS411; | | | |
| | PLAS384; OAC | | | |

[0284] The orsellinic acid synthase from Sparassis crispa is a non-reducing iterative Type-1 PKS. This enzyme takes acetyl-coA, a native yeast metabolite, and iteratively adds 3 molecules of malonyl-coA to it which is then subsequently cyclizes to produce orsellinic acid. The orsellinic acid undergoes a prenylation catalyzed by PT161, in which one molecule of geranyl pyrophosphate (GPP) is condensed with one molecule of orsellinic acid, to produce cannabigorcinic acid (CBGOa). This is depicted in FIG. 12.

[0285] The S. cerevisiae strain used in this disclosure expresses a phosphopantetheinyl transferase, NpgA from Aspergillus niger. This enzyme is an accessory protein for the polyketide synthase OAS2 and is involved in the co-factor binding for OAS2.

[0286] The S. cerevisiae strain used in this disclosure contains a mutation in the ERG20 protein, ERG20K197E, that allows it to accumulate GPP inside the cell (Oswald et al., 2007), making it available for the prenylation reaction. This strain also overexpresses a truncated version of the HMGr1 protein and an ID11 protein, which are both native proteins that have been demonstrated to be bottlenecks in the S. cerevisiae terpenoid pathway (Ro et al., 2006), as a means to alleviate bottlenecks and increase the flux of carbon towards GPP accumulation in the cells. The base strain also overexpresses the MAF1 protein which is a negative regulator for tRNA biosynthesis in S. cerevisiae, as overexpression of this protein has been demonstrated to increase GPP accumulation in the cell (Liu et al., 2013).

[0287] The base strain also has multiple modifications that increase the available pool of acetyl-coA and malonyl-coA in the cell. The overexpression of the PDH bypass, which consists of the proteins ALD6 from S. cerevisiae and ACS1^{L641P} from Salmonella enterica, allows for a much greater pool of acetyl-coA in the cytosol of the yeast cell (Shiba et al., 2007). In addition, the native S. cerevisiae acetoacetyl coA carboxylase, ACC1, protein was also overexpressed by changing its promoter to a constitutive promoter. Two additional mutations, S659A and S1157A, were made in ACC1 in order to alleviate negative regulation by post-translational modification (Shi et al., 2014). This allows the yeast cell to have a much greater accumulation of malonyl-coA. The greater accumulation of acetyl-coA and malonyl-coA are necessary for orsellinic acid production in the cell.

[0288] Materials and Methods

[0289] Genetic Manipulations. HB144 was used as a base strain to develop all other strains in this experiment. All DNA was transformed into strains using the Gietz et al transformation protocol (Geitz, 2014). Plas 36 was used for the CRISPR-based genetic modifications described in this experiment (Ryan et al., 2016).

[0290] The genome at USER Site X-4 (Jensen et al., 2014) in HB144 was targeted using Cas9 and gRNA expressed from PLAS36 which was transformed into HB144. The donor for the recombination was SEQ ID NO. 99. Successful integrations were selected on YPD+200 ug/ml Hygromycin and confirmed by colony PCR. This led to the creation of HB837 with a Galactose inducible OAS2 encoding gene integrated into the genome of HB144. The genomic region containing SEQ ID NO. 99 was also verified by sequencing to confirm the presence of the OAS2 encoding gene. This allowed for the creation of an orsellinic acid producing strain, HB837. PLAS246 which encodes a galactose-inducible gene expressing PT161 was subsequently transformed into HB837 producing a strain that can synthesize cannabigorcinic acid directly from glucose.

[0291] Strain Growth and Media. HB837 was grown on Synthetic complete yeast minimal media with a composition of 1.7 g/L YNB without ammonium sulfate+1.96 g/L URA dropout amino acid supplements+76 mg/L uracil+1.5 g/L magnesium L-glutamate) with 2% w/v galactose, 2% w/v raffinose, 200 μg/l geneticin, and 200 ug/L ampicillin (Sigma-Aldrich Canada). HB837+PLAS246 was grown in the above described media lacking the Uracil component to select for the presence of PLAS246.

[0292] Experimental Conditions. Six single colony replicates of strains were tested in this study. All strains were grown in 1 ml cultures in 96-well deepwell plates. The deepwell plates were incubated at 30° C. and shaken at 250 rpm for 96 hrs.

[0293] Metabolite extraction was performed with 300 μl of Acetonitrile added to 100 μl culture in a new 96-well deepwell plate, followed by 30 min of agitation at 950 rpm. The solutions were then centrifuged at 3750 rpm for 5 min. 200 μl of the soluble layer was removed and stored in a 96-well v-bottom microtiter plate. Samples were stored at −20° C. until analysis.

[0294] Results

[0295] In the data for the in vivo production of orsellinic acid, samples were quantified using HPLC-MS analysis.

[0296] FIG. 13 depicts a chromatogram showing positive production of CBG.

[0297] FIG. 14 depicts a chromatogram showing positive production of CBGa

[0298] FIG. 15 depicts a chromatogram showing positive production of CBGVa

[0299] FIG. 16 depicts a chromatogram showing positive production of CBGO

[0300] FIG. 17 depicts a chromatogram showing positive production of CBGOa

[0301] FIG. 18 illustrates increased in vivo orsellinic acid and CBGOa production, specifically: orsellinic acid (33.67±3.52 versus 19.73±4.46) and CBGOa (0.0±0.0 versus 34.86±2.91), for HB837+PLAS247, as compared with HB837 alone (mean±stdev).

[0302] part 3

[0303] Polyketide Synthase III and Acyl-CoA Synthases for Production of Aromatic Polyketides and Phytocannabinoids

[0304] This section relates generally to methods and cell lines for the production of aromatic polyketides, which can be used in phytocannabinoid synthesis utilizing a polyketide synthase III (interchangeably referenced herein as type 3 PKS or PKSIII). Examples include production of a variety of cannabinoids with PKSIII and acyl-CoA synthase enzymes in yeast, by providing different feeds. Such polyketides are useful intermediate/precursors in phytocannabinoid synthesis.

### Overview

[0305] There is provided herein a method of producing an aromatic polyketide and/or a phytocannabinoid in a host cell, comprising introducing a polynucleotide encoding a type 3 PKS protein and/or an acyl-CoA synthase protein into the host cell, and culturing the host cell under conditions sufficient for aromatic polyketide production.

[0306] Further, there is provided a method of producing a phytocannabinoid or phytocannabinoid derivative in a host cell, comprising introducing a polynucleotide encoding a type 3 PKS protein and/or an acyl-CoA synthase protein into the host cell, and culturing the cell under conditions sufficient for aromatic polyketide production, and for phytocannabinoid or phytocannabinoid derivative production therefrom.

[0307] Additionally, there is provided a method of producing an aromatic polyketide or phytocannabinoid, comprising: providing a host cell which produces from glucose, or is provided with, a fatty acid-CoA and an acetoacetyl-containing extender unit, introducing into the host cell a polynucleotide encoding a type 3 polyketide synthase (PKS) protein and/or an acyl-CoA synthase protein, and culturing the host cell under conditions sufficient for production of the aromatic polyketide, and/or the phytocannabionoid.

[0308] There is also provided a method of producing a phytocannabinoid or phytocannabinoid analogue, comprising: providing a host cell which produces from glucose, or is provided with, a fatty acid-CoA and an acetoacetyl-containing extender unit, and which prenylates aromatic polyketides with a prenyl donor, introducing into the host cell a polynucleotide encoding a type 3 polyketide synthase (PKS) protein, and culturing the host cell under conditions sufficient for production of the type 3 PKS protein for producing the aromatic polyketide for prenylation with the prenyl donor to form the phytocannabinoid or phytocannabinoid analogue.

[0309] Further, there is provided herein an expression vector comprising a nucleotide sequence encoding a type 3 PKS protein, wherein: the nucleotide sequence comprises at least 70% identity with a nucleotide sequence as set forth in any one of SEQ ID NO: 120 to 137, SEQ ID NO: 156 to 207, SEQ ID NO: 261 to 265, or a nucleotide encoding any one of SEQ ID NO:314 to 343 (PKS80 to PKS109); the type 3 PKS protein comprises at least 70% identity with any one of SEQ ID NO: -138 to 155, SEQ ID NO: 208 to 259, SEQ ID NO: 266 to 270, or SEQ ID NO:314 to 343 (PKS80 to PKS109); or the type 3 PKS protein comprises or consists of the consensus sequence as set forth in SEQ ID NO: 260. The acyl-CoA synthase protein may comprise or consist of a protein as set forth in any one of SEQ ID NO: 284 to 313 (Alk1 to Alk30), or a protein with at least 70% identity with any one of SEQ ID NO: 284 to 313 (Alk1 to Alk30). Host cells transformed with the expression vector are also provided herein.

[0310] PKSIII (or type 3 PKS) activity in yeast as well as production of novel polyketides and cannabinoids is described herein. Further, production of tetrahydrocannabivarin acid (THCVa) can be achieved by providing butyric acid to a described polyketide synthase. Further, improvements in THCVa titres by expressing a set of novel PKSIII and acyl-CoA enzymes in yeast are described. It is established in these Examples that the expression of many of these enzymes greatly improves phytocannabinoid titres.

[0311] In one exemplary embodiment, a method is described in which a host cell comprises a polynucleotide encoding at least one type 3 PKS protein selected from the group consisting of PKS80-PKS109, at least one acyl-CoA synthase protein selected from the group consisting of Alk-Alk30, and optionally a polynucleotide encoding CSAAE1, PC20, PKS73, PT254, and/or OXC155.

### Detailed Description of Part 3

[0312] Generally, there is described herein the production of polyketides in recombinant organisms, which are within the synthetic pathway to formation of phytocannabinoids or phytocannabinoid analogues.

[0313] Phytocannabinoids are a large class of compounds with over 100 different known structures that are produced in the Cannabis sativa plant. These bio-active molecules, such as tetrahydrocannabinol (THC) and cannabidiol (CBD), can be extracted from plant material for medical and recreational purposes. However, the synthesis of plant material is costly, not readily scalable to large volumes, and requires lengthy growing periods to produce sufficient quantities of phytocannabinoids.

[0314] Early stages of the cannabinoid synthetic pathway proceed via the generation of olivetolic acid by the type III PKS olivetolic acid synthase (OAS) and cyclase olivetolic acid cyclase (OAC) (Taura et al., 2009). This reaction uses a hexanoyl-CoA starter as well as three units of malonyl-CoA. Olivetolic acid is the backbone of most classical cannabinoids and can be prenylated to form CBGA, which is ultimately converted to CBDA or THCA by an oxidocyclase. Production of olivetolic acid in S. cerevisiae is challenging as OAS generates significant by-products such as HTAL, PDAL and olivetol (Gagne et al., 2012).

[0315] Phytocannabinoids may be synthesized from polyketides such as olivetolic acid by prenylation of the polyketide, ie—the formation of a C—C bond between the polyketide and an allylic isoprene, such as diphosphate geranyl pyrophosphate (GPP). Prenylation of olivetolic acid by GPP produces the cannabinoid cannabigerolic acid (CBGa). This reaction type is catalyzed by enzymes known as prenyltransferases. The Cannabis plant utilizes a membrane-bound prenyltransferase to catalyze the addition of the prenyl moiety to olivetolic acid to form CBGa.

[0316] In one aspect, there is a method described of producing polyketides in a recombinant organism, which polyketide may be used by the organism in a pathway to synthesis of a phytocannabinoid or phytocannabinoid analogue.

[0317] A method is described herein for producing a phytocannabinoid or an aromatic polyketide in a host cell, comprising introducing a polynucleotide encoding a type 3 PKS protein and/or an acyl-CoA synthase protein into the host cell, and culturing the cell under conditions sufficient for aromatic polyketide production, and optionally under conditions sufficient for phytocannabinoid production therefrom.

[0318] The host cell may produce the aromatic polyketide from a fatty acid-CoA and an acetoacetyl-containing extender unit, which may be either synthesized by the cell, for example via metabolism of a sugar such as glucose. Alternatively, these compounds may be provided to the host cell.

[0319] A further method of producing an aromatic polyketide is described herein, comprising: providing a host cell which produces from glucose, or is provided with, a fatty acid-CoA and an acetoacetyl-containing extender unit; introducing into the host cell a polynucleotide encoding a type 3 polyketide synthase (PKS) protein; and culturing the host cell under conditions sufficient for production of the aromatic polyketide protein for producing the aromatic polyketide from the fatty acid-CoA and the extender unit.

[0320] Further, the host cell may produce the aromatic polyketide using the acyl-CoA synthase.

[0321] Additionally, a method of producing a phytocannabinoid or phytocannabinoid analogue is described herein. The method comprises providing a host cell which produces from glucose, or is provided with, a fatty acid-CoA and an acetoacetyl-containing extender unit, and which prenylates aromatic polyketides with a prenyl donor; introducing into the host cell a polynucleotide encoding a type 3 polyketide synthase (PKS) protein; and culturing the host cell under conditions sufficient for production of the type 3 PKS protein for producing the aromatic polyketide for prenylation with the prenyl donor to form the phytocannabinoid or phytocannabinoid analogue.

[0322] Introducing the polynucleotide into the host cell may comprise transformation of the host cell using any acceptable transformation methodology.

[0323] The type 3 PKS protein is one that is not native to C. sativa. For example, the type 3 PKS protein may comprise or consist of: (a) a protein as set forth in any one of SEQ ID NO: -138-155, SEQ ID NO: -208-259, SEQ ID NO: 266-270, or SEQ ID NO:314-343 (PKS80 to PKS109); (b) a protein with at least 70% identity with any one of SEQ ID NO: 138-155, SEQ ID NO: -208-259, SEQ ID NO: 266-270, or SEQ ID NO:314-343 (PKS80 to PKS109); (c) a protein that differs from (a) by one or more residues that are substituted, deleted and/or inserted; or (d) a derivative of (a), (b), or (c).

[0324] The acyl-CoA synthase protein may comprise or consists of (a) a protein as set forth in any one of SEQ ID NO: 284-313 (Alk1 to Alk30); (b) a protein with at least 70% identity with any one of SEQ ID NO: 284-313 (Alk1 to Alk30); (c) a protein that differs from (a) by one or more residues that are substituted, deleted and/or inserted; or (d) a derivative of (a), (b), or (c).

[0325] The nucleotide sequence encoding the type 3 PKS protein is also one that is not native to C. sativa. For example, it may be a sequence that comprises or consisting of: (a) a nucleotide sequence as set forth in any one of SEQ ID NO: -120-137, SEQ ID NO: 156-207, SEQ ID NO: 261-265, or a nucleotide encoding any one of SEQ ID NO:314-343 (PKS80 to PKS109); (b) a nucleotide sequence having at least 70% identity with the nucleotide sequence of (a); (c) a nucleotide that hybridizes with the complementary strand of the nucleotide sequence of (a); (d) a nucleotide sequence that differs from (a) by one or more nucleotides that are substituted, deleted, and/or inserted; or (e) a derivative of (a), (b), (c), or (d). In the event a complementary strand is used, the nucleotide may be one that hybridizes with the complementary strand of the nucleotide sequence of (a) under conditions of high stringency.

[0326] The protein may have at least 70%, 71%, 72%, 73%, 74%, 75%, 76%, 77%, 78%, 79%, 80%, 81%, 82%, 83%, 84%, 85%, 86%, 87%, 88%, 89%, 90%, 91%, 92%, 93%, 94%, 95%, 96%, 97%, 98%, or 99% sequence identity to any one of SEQ ID NO: -138-155, SEQ ID NO: -208-259, SEQ ID NO: 266-270, or SEQ ID NO:314-343 (PKS80 to PKS109). The type 3 PKS protein may comprises or consists of the consensus sequence as set forth in SEQ ID NO: 260, reflecting consensus based on sequences SEQ ID NO: -138-155, SEQ ID NO: -208-259, and SEQ ID NO: -266-270.

[0327] The nucleotide sequence may be at least 70%, 71%, 72%, 73%, 74%, 75%, 76%, 77%, 78%, 79%, 80%, 81%, 82%, 83%, 84%, 85%, 86%, 87%, 88%, 89%, 90%, 91%, 92%, 93%, 94%, 95%, 96%, 97%, 98%, or 99% sequence identity with the nucleotide as set forth in any one of SEQ ID NO: -120-137, SEQ ID NO: -156-207, or SEQ ID NO: -261-265.

[0328] The nucleotide sequence encoding the acyl-CoA synthases protein may comprise or consisting of: (a) a nucleotide sequence encoding a protein as set forth in any one of SEQ ID NO: 284-313 (Alk1 to 30); (b) a nucleotide sequence having at least 70% identity with the nucleotide sequence of (a); (c) a nucleotide that hybridizes with the complementary strand of the nucleotide sequence of (a); (d) a nucleotide sequence that differs from (a) by one or more nucleotides that are substituted, deleted, and/or inserted; or (e) a derivative of (a), (b), (c), or (d).

[0329] The acetoacetyl-containing extender unit used in the method may comprise malonyl-CoA.

[0330] The host cell may comprise one or more genetic modifications that increase the available malonyl-CoA in the cell.

[0331] The aromatic polyketide may be any of those described herein as formula 3-I to 3-VI. For example, the aromatic polyketide may be olivetol, olivetolic acid, divarin, divarinic acid, orcinol, or orsellinic acid.

[chemical structure]

[chemical structure]

[0332] In the methods wherein the host cell produces a phytocannabinoid or phytocannabinoid analogue, this may be done by prenylation of the aromatic polyketide with a prenyl donor. The prenyl donor may be described as shown in formula 3-VII.

[chemical structure]

[0333] The phytocannabinoid or phytocannabinoid analogue formed may be any of formula 3-VIII to 3-XII.

[chemical structure]

[0334] The phytocannabinoid so formed may be cannabigerol (CBG), cannabigerolic acid (CBGa), cannabigerovarin (CBGv), cannabigerovarinic acid (CBGva), cannabigerocin (CBGO), or cannabigerocinic acid (CBGOa). For example, when the aromatic polyketide is olivetol the phytocannabinoid is cannabigerol (CBG), when the aromatic polyketide is olivetolic acid the phytocannabinoid is cannabigerolic acid (CBGa), when said aromatic polyketide is divarin the phytocannabinoid is cannabigerovarin (CBGv), when the aromatic polyketide is divarinic acid the phytocannabinoid is cannabigerovarinic acid (CBGva), when the polyketide is orcinol the phytocannabinoid is cannabigerocin (CBGO), or when the aromatic polyketide is orsellinic acid the phytocannabinoid is cannabigerocinic acid (CBGOa).

[0335] The host cell may be a bacterial cell, a fungal cell, a protist cell, or a plant cell, and may for example, be any one of the cell types described hereinbelow. For example, the host cell is S. cerevisiae, E. coli, Yarrowia lipolytica, or Komagataella phaffii.

[0336] An expression vector is described herein comprising a nucleotide sequence encoding a type 3 PKS protein, wherein: the nucleotide sequence comprises at least 70% identity with a nucleotide sequence as set forth in any one of SEQ ID NO: -120-137, SEQ ID NO: 156-207, or SEQ ID NO: -261-265; the type 3 PKS protein comprises at least 70% identity with any one of SEQ ID NO: -138-155, SEQ ID NO: 208-259, SEQ ID NO: 266-270, or SEQ ID NO:314-343 (PKS80 to PKS109); or the type 3 PKS protein comprises or consists of the consensus sequence as set forth in SEQ ID NO: 260, as based on the consensus of sequences SEQ ID NO: -138-155, SEQ ID NO: -208-259, and SEQ ID NO: 266-270. It is understood that the expression “at least 70% identity” encompasses identities of 71%, 72%, 73%, 74%, 75%, 76%, 77%, 78%, 79%, 80%, 81%, 82%, 83%, 84%, 85%, 86%, 87%, 88%, 89%, 90%, 91%, 92%, 93%, 94%, 95%, 96%, 97%, 98%, or 99% with the specified sequence. The expression vector may comprise or consist of a nucleic acid sequence encoding the type 3 PKS protein according to SEQ ID NO: 260. A host cell transformed with this expression vector is also described, wherein the host cell is a bacterial cell, a fungal cell, a protist cell, or a plant cell, for example of any of the types described herein below, with exemplary (but non-limiting) cell types being: S. cerevisiae, E. coli, Yarrowia lipolytica, or Komagataella phaffii.

[0337] In some example of the method herein, the phytocannabinoid produced is cannabigerol (CBG), cannabigerolic acid (CBGa), cannabigerovarin (CBGv), cannabigerovarinic acid (CBGva), cannabigerocin (CBGo), or cannabigerocinic acid (CBGoa).

[0338] In some example of the method herein, the polyketide is olivetol, olivetolic acid, divarin, divarinic acid, orcinol, or orsellinic acid.

[0339] In some examples of the downstream use of the polyketides produced in recombinant organisms as described herein, the polyketide may go on to phytocannabinoid synthesis. For example, the polyketide is olivetol then the phytocannabinoid is cannabigerol (CBG), when the polyketide is olivetolic acid then the phytocannabinoid is cannabigerolic acid (CBGa), when the polyketide is divarin then the phytocannabinoid is cannabigerovarin (CBGv), when the polyketide is divarinic acid then the phytocannabinoid is cannabigerovarinic acid (CBGva), when the polyketide is orcinol then the phytocannabinoid is cannabigerocin (CBGo), and when the polyketide is orsellinic acid then the phytocannabinoid produced is cannabigerocinic acid (CBGoa).

[0340] In the method described herein, the host cell may comprise a polynucleotide encoding at least one type 3 PKS protein selected from the group consisting of PKS80-PKS109, at least one acyl-CoA synthase protein selected from the group consisting of Alk1-Alk30, and optionally a polynucleotide encoding CSAAE1, PC20, PKS73, PT254, and/or OXC155.

[0341] In one example, the host cell is fed butyric acid and produces THCVa.

[0342] An expression vector is described comprising a nucleotide sequence encoding a type 3 PKS protein and/or an acyl-CoA synthase protein, wherein the type 3 PKS encoding nucleotide sequence comprises at least 70% identity with a nucleotide sequence as set forth in any one of SEQ ID NO: -120-137, SEQ ID NO: 156-207, SEQ ID NO: 261-265, or a nucleotide encoding any one of SEQ ID NO:314-343 (PKS80 to PKS109); the type 3 PKS protein comprises at least 70% identity with any one of SEQ ID NO: 138-155, SEQ ID NO: 208-259, SEQ ID NO: 266-270, or SEQ ID NO:314-343 (PKS80 to PKS109); or the type 3 PKS protein comprises or consists of the consensus sequence as set forth in SEQ ID NO: 260; and/or the acyl-CoA synthase protein encoding nucleotide sequence comprises at least 70% identity with a nucleotide sequence encoding a protein as set forth in any one of SEQ ID NO: 284-313 (Alk1-Alk30); or the an acyl-CoA synthase protein comprises at least 70% identity with any one of SEQ ID NO: 284-313 (Alk1-Alk30).

[0343] The protein(s) encoded by the expression vector may have at least 70%, 71%, 72%, 73%, 74%, 75%, 76%, 77%, 78%, 79%, 80%, 81%, 82%, 83%, 84%, 85%, 86%, 87%, 88%, 89%, 90%, 91%, 92%, 93%, 94%, 95%, 96%, 97%, 98%, or 99% sequence identity with any one of SEQ ID NO: -138-155, SEQ ID NO: 208-259, SEQ ID NO: 266-270, or SEQ ID NO:314-343 (PKS80 to PKS109).

[0344] Further, the expression vector may comprise the nucleotide sequence which has at least 70%, 71%, 72%, 73%, 74%, 75%, 76%, 77%, 78%, 79%, 80%, 81%, 82%, 83%, 84%, 85%, 86%, 87%, 88%, 89%, 90%, 91%, 92%, 93%, 94%, 95%, 96%, 97%, 98%, or 99% sequence identity with any one of SEQ ID NO: -120-137, SEQ ID NO: 156-207, or SEQ ID NO: -261-265.

[0345] A host cell transformed with the expression vector above is described herein, which may be a bacterial cell, a fungal cell, a protist cell, or a plant cell. Table 2 described a variety of host cell types within these categories. Exemplary host cells include S. cerevisiae, E. coli, Yarrowia lipolytica, or Komagataella phaffii.

[0346] Reference is made to Table 1, above, which provides a list of polyketides, prenyl donors and prenylated polyketides which may be used or produced in the methods described.

[0347] These polyketides, together with prenyl donors and resulting prenylated polyketides are listed so as to illustrate the phytocannabinoids that may be synthesized as a result. The following terms are used: DMAPP for dimethylallyl diphosphate; GPP for geranyl diphosphate; FPP for farnesyl diphosphate; NPP for neryl diphosphate; and IPP for isopentenyl diphosphate.

[0348] As provided above in Table 2 there are numerous specific examples of host cell organisms possible for use in one or more of the methods described herein.

[0349] Table 24 lists possible CoA donors (or “primers”) for use in the polyketide synthase reaction of type 3 PKS, together with extender units containing acetoacetyl moieties (such as malonyl-CoA) to thereby form a polyketide intermediate in host cell formation of phytocannabinoids.

TABLE 24
CoA donors for Type 3 PKS reaction

| Structure | R-Group, if any |
|---|---|
| [chemical structure] | R = CH₃, C₂H₅, C₃H₇, C₄H₉, C₅H₁₁, C₆H₁₃, C₇H₁₅, C₈H₁₇, C₁₆H₃₃, C₁₈H₃₇, |
| [chemical structure] | R = H, OH |
| [chemical structure] | |
| [chemical structure] | |
| [chemical structure] | |
| [chemical structure] | |
| [chemical structure] | |
| [chemical structure] | |
| [chemical structure] | |

[0350] Table 25 lists the sequences described herein, for greater certainty. Actual sequences are provided in later tables, below. The Type 3 PKS protein is one that is not native to C. sativa.

TABLE 25
List of sequence characteristics

| SEQ ID NO: | Description | DNA/Protein |
|---|---|---|
| SEQ ID NO: 119 | pET21d(+) | DNA |
| | Empty Vector | |
| SEQ ID NO. 120 | PKS8 | DNA |
| SEQ ID NO. 121 | PKS10 | DNA |
| SEQ ID NO. 122 | PKS17 | DNA |
| SEQ ID NO. 123 | PKS20 | DNA |
| SEQ ID NO. 124 | PKS22 | DNA |
| SEQ ID NO. 125 | PKS25 | DNA |
| SEQ ID NO. 126 | PKS26 | DNA |
| SEQ ID NO. 127 | PKS27 | DNA |
| SEQ ID NO. 128 | PKS31 | DNA |
| SEQ ID NO. 129 | PKS33 | DNA |
| SEQ ID NO. 130 | PKS47 | DNA |
| SEQ ID NO. 131 | PKS48 | DNA |
| SEQ ID NO. 132 | PKS49 | DNA |
| SEQ ID NO. 133 | PKS54 | DNA |
| SEQ ID NO. 134 | PKS56 | DNA |
| SEQ ID NO. 135 | PKS57 | DNA |
| SEQ ID NO. 136 | PKS58 | DNA |
| SEQ ID NO. 137 | PKS61 | DNA |
| SEQ ID NO. 138 | PKS8 | Protein |
| SEQ ID NO. 139 | PKS10 | Protein |
| SEQ ID NO. 140 | PKS17 | Protein |
| SEQ ID NO. 141 | PKS20 | Protein |
| SEQ ID NO. 142 | PKS22 | Protein |
| SEQ ID NO. 143 | PKS25 | Protein |
| SEQ ID NO. 144 | PKS26 | Protein |
| SEQ ID NO. 145 | PKS27 | Protein |
| SEQ ID NO. 146 | PKS31 | Protein |
| SEQ ID NO. 147 | PKS33 | Protein |
| SEQ ID NO. 148 | PKS47 | Protein |
| SEQ ID NO. 149 | PKS48 | Protein |
| SEQ ID NO. 150 | PKS49 | Protein |
| SEQ ID NO. 151 | PKS54 | Protein |
| SEQ ID NO. 152 | PKS56 | Protein |
| SEQ ID NO. 153 | PKS57 | Protein |
| SEQ ID NO. 154 | PKS58 | Protein |
| SEQ ID NO. 155 | PKS61 | Protein |
| SEQ ID NO. 156 | PKS02 | DNA |
| SEQ ID NO. 157 | PKS03 | DNA |
| SEQ ID NO. 158 | PKS04 | DNA |
| SEQ ID NO. 159 | PKS05 | DNA |
| SEQ ID NO. 160 | PKS06 | DNA |
| SEQ ID NO. 161 | PKS07 | DNA |
| SEQ ID NO. 162 | PKS09 | DNA |
| SEQ ID NO. 163 | PKS11 | DNA |
| SEQ ID NO. 164 | PKS12 | DNA |
| SEQ ID NO. 165 | PKS13 | DNA |
| SEQ ID NO. 166 | PKS14 | DNA |
| SEQ ID NO. 167 | PKS15 | DNA |
| SEQ ID NO. 168 | PKS16 | DNA |
| SEQ ID NO. 169 | PKS18 | DNA |
| SEQ ID NO. 170 | PKS19 | DNA |
| SEQ ID NO. 171 | PKS21 | DNA |
| SEQ ID NO. 172 | PKS23 | DNA |
| SEQ ID NO. 173 | PKS24 | DNA |
| SEQ ID NO. 174 | PKS28 | DNA |
| SEQ ID NO. 175 | PKS29 | DNA |
| SEQ ID NO. 176 | PKS30 | DNA |
| SEQ ID NO. 177 | PKS32 | DNA |
| SEQ ID NO. 178 | PKS34 | DNA |
| SEQ ID NO. 179 | PKS35 | DNA |
| SEQ ID NO. 180 | PKS36 | DNA |
| SEQ ID NO. 181 | PKS37 | DNA |
| SEQ ID NO. 182 | PKS38 | DNA |
| SEQ ID NO. 183 | PKS39 | DNA |
| SEQ ID NO. 184 | PKS40 | DNA |
| SEQ ID NO. 185 | PKS41 | DNA |
| SEQ ID NO. 186 | PKS42 | DNA |
| SEQ ID NO. 187 | PKS43 | DNA |
| SEQ ID NO. 188 | PKS44 | DNA |
| SEQ ID NO. 189 | PKS45 | DNA |
| SEQ ID NO. 190 | PKS46 | DNA |
| SEQ ID NO. 191 | PKS50 | DNA |
| SEQ ID NO. 192 | PKS51 | DNA |
| SEQ ID NO. 193 | PKS52 | DNA |
| SEQ ID NO. 194 | PKS53 | DNA |
| SEQ ID NO. 195 | PKS55 | DNA |
| SEQ ID NO. 196 | PKS59 | DNA |
| SEQ ID NO. 197 | PKS60 | DNA |
| SEQ ID NO. 198 | PKS62 | DNA |
| SEQ ID NO. 199 | PKS63 | DNA |
| SEQ ID NO. 200 | PKS64 | DNA |
| SEQ ID NO. 201 | PKS65 | DNA |
| SEQ ID NO. 202 | PKS66 | DNA |
| SEQ ID NO. 203 | PKS67 | DNA |
| SEQ ID NO. 204 | PKS68 | DNA |
| SEQ ID NO. 205 | PKS69 | DNA |
| SEQ ID NO. 206 | PKS70 | DNA |
| SEQ ID NO. 207 | PKS71 | DNA |
| SEQ ID NO. 208 | PKS02 | Protein |
| SEQ ID NO. 209 | PKS03 | Protein |
| SEQ ID NO. 210 | PKS04 | Protein |
| SEQ ID NO. 211 | PKS05 | Protein |
| SEQ ID NO. 212 | PKS06 | Protein |
| SEQ ID NO. 213 | PKS07 | Protein |
| SEQ ID NO. 214 | PKS09 | Protein |
| SEQ ID NO. 215 | PKS11 | Protein |
| SEQ ID NO. 216 | PKS12 | Protein |
| SEQ ID NO. 217 | PKS13 | Protein |
| SEQ ID NO. 218 | PKS14 | Protein |
| SEQ ID NO. 219 | PKS15 | Protein |
| SEQ ID NO. 220 | PKS16 | Protein |
| SEQ ID NO. 221 | PKS18 | Protein |
| SEQ ID NO. 222 | PKS19 | Protein |
| SEQ ID NO. 223 | PKS21 | Protein |
| SEQ ID NO. 224 | PKS23 | Protein |
| SEQ ID NO. 225 | PKS24 | Protein |
| SEQ ID NO. 226 | PKS28 | Protein |
| SEQ ID NO. 227 | PKS29 | Protein |
| SEQ ID NO. 228 | PKS30 | Protein |
| SEQ ID NO. 229 | PKS32 | Protein |
| SEQ ID NO. 230 | PKS34 | Protein |
| SEQ ID NO. 231 | PKS35 | Protein |
| SEQ ID NO. 232 | PKS36 | Protein |
| SEQ ID NO. 233 | PKS37 | Protein |
| SEQ ID NO. 234 | PKS38 | Protein |
| SEQ ID NO. 235 | PKS39 | Protein |
| SEQ ID NO. 236 | PKS40 | Protein |
| SEQ ID NO. 237 | PKS41 | Protein |
| SEQ ID NO. 238 | PKS42 | Protein |
| SEQ ID NO. 239 | PKS43 | Protein |
| SEQ ID NO. 240 | PKS44 | Protein |
| SEQ ID NO. 241 | PKS45 | Protein |
| SEQ ID NO. 242 | PKS46 | Protein |
| SEQ ID NO. 243 | PKS50 | Protein |
| SEQ ID NO. 244 | PKS51 | Protein |
| SEQ ID NO. 245 | PKS52 | Protein |
| SEQ ID NO. 246 | PKS53 | Protein |
| SEQ ID NO. 247 | PKS55 | Protein |
| SEQ ID NO. 248 | PKS59 | Protein |
| SEQ ID NO. 249 | PKS60 | Protein |
| SEQ ID NO. 250 | PKS62 | Protein |
| SEQ ID NO. 251 | PKS63 | Protein |
| SEQ ID NO. 252 | PKS64 | Protein |
| SEQ ID NO. 253 | PKS65 | Protein |
| SEQ ID NO. 254 | PKS66 | Protein |
| SEQ ID NO. 255 | PKS67 | Protein |
| SEQ ID NO. 256 | PKS68 | Protein |
| SEQ ID NO. 257 | PKS69 | Protein |
| SEQ ID NO. 258 | PKS70 | Protein |
| SEQ ID NO. 259 | PKS71 | Protein |
| SEQ ID NO. 260 | Consensus | Protein |
| SEQ ID NO. 261 | PKS72 | DNA |
| SEQ ID NO. 262 | PKS73 | DNA |
| SEQ ID NO. 263 | PKS74 | DNA |
| SEQ ID NO. 264 | PKS75 | DNA |
| SEQ ID NO. 265 | PKS76 | DNA |
| SEQ ID NO. 266 | PKS72 | Protein |
| SEQ ID NO. 267 | PKS73 | Protein |
| SEQ ID NO. 268 | PKS74 | Protein |
| SEQ ID NO. 269 | PKS75 | Protein |
| SEQ ID NO. 270 | PKS76 | Protein |

[0351] In one embodiment, a consensus sequence for Type 3 PKS, based on sequences SEQ ID NO: -138 to 155, SEQ ID NO: -208 to 259, and SEQ ID NO: -266 to 270 is:

(SEQ ID NO: 260)
xxxxxxxxxxxxxxxxxxxxxxxxxxxxxxxxQrAExGxxxxATILAIGT
AxPxNxIxQSDYxDYYFRITxxSExxTELKEKFKRxICDKSxIKKRYxxx
xxMxLxxExxxxxxxxxxxxxxxxxxxxxxxxxxxxxExLKENPNMxxYx
xxxxxxxxxxxxxxxPSLDxRxDIxVxEVPKLxKEAAxKAIKExxWGQxx
xSxxKITHLVFxTxTGxVxMPGxDYQLxKxLGxLrPSVKRVMMYxMGCFA
GgTxLRLAKDLAENNxxxxKGAxxRVLVVCSEIxTAxVxFRxPSDxxxxx
LDSLxVGxALFGDGxAAAVIVGADPxxxxxxExxxRPLFELVxxxQxILP
DSExaIxxxxxLRExGLxFxLxxKxVPxxxxxLISkNIEkxLxExxxxLx
xxxxgxxxxxxxISxxDWNxxxxxxLFWIVHPGGxAILDxVExkLGLxxE
KMRATRxVLSEYGNMSSAxVLEVLDEMRKKsxxxEGxxxxGExxxxxGxE
WGVLxxFGPGLTVExVVLxSVxxxxxxxxxxxxxxxxxxxxxxxxxxxxx
xxxxxxxxxxxxxxxxxxxxxxxxxxxxxxxxxxxxxxxxxxxxxxxxxx
xxxxxxxxxx.

[0352] Amino acid sequences in agreement with the consensus sequence, and nucleotide sequences encoding such amino acid sequences are encompassed herein.

[0353] The method of the invention can be conveniently practiced by providing the compounds and/or compositions in the form of a kit, which may be used in a method to transform a host cell. Such kits may contain or be associated with instructions for use thereof.

### EXAMPLES—PART 3

[0354] To gain a better understanding of the invention described herein, the following examples are set forth. It should be understood that these examples are for illustrative purposes only. Therefore, they should not limit the scope of this invention in anyway.

### Example 4

[0355] Functional Demonstration of Production of Polyketides in a Transformed Host Cell.

### INTRODUCTION

[0356] Phytocannabinoids, such as tetrahydrocannabinol (THC) and cannabidiol (CBD), can be extracted from plant material for medical and psychotropic purposes. However, the synthesis of plant material is costly, not readily scalable to large volumes, and requires a lengthy grow periods to produce sufficient quantities of phytocannabinoids. An organism capable of fermentation, such as Saccharomyces cerevisiae, that is capable of producing cannabinoids would provide an economical route to producing these compounds on an industrial scale.

[0357] The early stages of the cannabinoid pathway proceeds via the generation of olivetolic acid by the type III PKS olivetolic acid synthase (OAS) and cyclase olivetolic acid cyclase (OAC). This reaction uses a hexanoyl-CoA starter as well as three units of malonyl-CoA. Olivetolic acid is the backbone of most classical cannabinoids and can be prenylated to form CBGA, which is ultimately converted to CBDA or THCA by an oxidocyclase. Production of olivetolic acid in S. cerevisiae is challenging as OAS generates significant by-products such as HTAL, PDAL and olivetol.

[0358] These by-products can be reduced in a recombinant organism by the introduction of olivetolic acid cyclase (OAC) but even with this enzyme by-products can account for up to 80% of the total carbon in the reaction.

[0359] In this example, it is reported for the first time that the addition to a host organism of a type III polyketide synthase (PKS) renders the organism capable of producing olivetolic acid and olivetol from hexanoyl-CoA and malonyl-CoA. The addition of a type 3 PKS enzyme to a host cell may be used to improve cannabinoid production in hosts such as S. cerevisiae and E. coli, or any other appropriate host microorganism.

[0360] In addition, these type 3 PKS enzymes may be used to access resorcinol/resorcylic acids with variant alkyl tails such as orcinol, orsellinic acid, divarin, and divarinic acid. These polyketides so formed can be prenylated and used to produce cannabinoids such as cannabivarins and cannabiorcinols, in downstream metabolic reactions, optionally within the host organism.

[0361] FIG. 19 depicts pathways for formation of different polyketides (also referred to herein as resorcinols or resorcyclic acids) polyketides from a fatty acid-CoA with (3×) malonyl-CoA, as the acetoacetyl-containing extender unit, as a consequences of the type 3 polyketide synthase (type 3 PKS) reaction. Hexanoyl-CoA and (3×) malonyl-CoA form olivetol/olivetolic acid; butyrl-CoA and (3×) malonyl-CoA form divarin/divarinic acid; and acetyl-CoA together with (3×) malonyl-CoA form orcinol/orsellenic acid.

[0362] FIG. 20 depicts pathways for prenylation of polyketides with GPP, useful in the formation of certain phytocannabinoids. Please refer to FIG. 3 above, which shows structures of select phytocannabinoids of interest.

[0363] Materials and Methods

[0364] Plasmid Construction. All plasmids were synthesized by Twist DNA sciences. The sequences for PKS2 to PKS71 (see correspondence to SEQ ID Nos in Table 25) were synthesized in the pET21D+ vector (SEQ ID NO:119) between base-pair 5209 and 5210.

[0365] Upon receiving the DNA from Twist DNA sciences, 100 ng of each vector was transformed into E. coli BL21 (DE3) gold chemically competent cells. The cells were plated on LB Agar plates with 75 mg/L Ampicillin as the selective agent. Successful, isolated colonies were picked by hand and inoculated into 1 ml of LB media containing 75 mg/L ampicillin in 96-well sterile deep well plates. The plates were grown for 16 hours at 37° C. while being shaken at 250 RPM. After 16 hours 150 μl of each culture was transferred to a sterile microtiter plate containing 150 μl of 50% glycerol. The microtiter plates were sealed and stored at −80° C. as a cell stock.

[0366] SOP for feeding assay. E. coli BL21(DE3) Gold harbouring a plasmid containing a coding sequence for a type 3 PKS stored as a cell stock were inoculated into 1 mL cultures of TB Overnight Express autoinduction media containing 75 mg/L ampicillin in sterile 96-well 2 mL deep well plates. The cultures were grown overnight at 30° C. with shaking at 950 rpm. The following day the cells were harvested by centrifugation and frozen at −20° C. The thawed pellets were resuspended in 50 mM HEPES buffer (pH 7.5) with 10 mg/mL lysozyme, 2 U/mL benzonase, and 1× protease inhibitors. The suspension was incubated at 37° C. for 1 hour with shaking.

[0367] Following lysis, 20 μL of water was added to the cell lysate and centrifuged at max speed for 15 minutes. A total of 30 μL clear lysate was added to 20 μL of 50 mM HEPES buffer (pH 7.5) mixture containing a final concentration of 500 μM hexanoyl-CoA starter unit (the starter unity may be, for example: acetyl-CoA, butyryl-CoA, or hexanoyl-CoA), 1 mM malonyl-CoA extender unit, and 0.4% tween. The plate is sealed with a plate sealer and the reaction mixture is incubated at 30° C. without shaking in an incubator for 24 hours.

[0368] After 24 hours 200 μl of Acetonitrile was added to the reaction and the mixture was centrifuged at 3750 RPM for 10 minutes. 150 μl of the supernatant was then transferred to another microtiter plate, sealed and stored for analysis.

[0369] Quantification and Analysis. The analysis was performed using a Waters UPLC chromatography system connected to a Waters TQD mass spectrometer. The separation was performed on an Waters HSS column (1×50 mm, 1.8 um) using a reverse-phased method using water+0.1% formic acid as solvent A and acetonitrile (ACN)+0.1% formic acid as solvent B at a flow rate of 0.2 mL/min. Retention times (RT) for olivetol was 1.40 min and for olivetolic acid was 1.28 min.

[0370] Table 26 shows the column gradient profile used to isolate polyketide product.

TABLE 26
Gradient Profile

| | A | B |
|---|---|---|
| 0.00 min | 70% | 30% |
| 1.2 min | 50% | 50% |
| 1.70 min | 30% | 70% |
| 1.71 min | 70% | 30% |

[0371] The fractions assessed for olivetol or olivetolic acid were directed to mass spectrometry, performed using an ESI source in positive mode with a cone voltage of 24V and a collision voltage of 21V for the fragmentation.

[0372] Table 27 provides the parameters pertaining to the MS method for detection and quantification of products: olivetol and olivetolic acid.

TABLE 27
MS Parameters for Product Detection

| ES+ | M/Z | Transition | Cone Voltage (V) | Collision (V) |
|---|---|---|---|---|
| Olivetol | 181.1 | → 71 | 26 | 15 |
| Olivetolic Acid | 223.01 | → 171 | 35 | 20 |

[0373] Results and Discussion

[0374] E. coli cells transformed with Type 3 PKS and provided with hexanoyl-CoA and malonyl-CoA were able to form polyketide products.

[0375] Table 28 depicts olivetol and olivetolic acid concentrations found to be produced by a select subset of the transformed host cells upon culturing as described herein. The production of olivetol and olivetolic acid by feeding hexanoyl-CoA and malonyl-CoA to the transformed E. coli cells was evaluated in the cell lysate.

TABLE 28
Olivetol and Olivetolic Acid in Transformed E. coli Lysate

| | Olivetol Concentration | Olivetolic Acid |
|---|---|---|
| PKS # | (ug/L) | Concentration (ug/L) |
| Empty Vector | 0 | 0 |
| (Negative) | | |
| PKS8 | 0 | 1 |
| PKS10 | 0 | 10 |
| PKS17 | 0 | 6 |
| PKS20 | 0 | 15 |
| PKS22 | 0 | 2 |
| PKS25 | 0 | 1 |
| PKS26 | 0 | 1 |
| PKS27 | 0 | 2 |
| PKS31 | 0 | 1 |
| PKS33 | 0 | 1 |
| PKS47 | 2 | 1 |
| PKS48 | 0 | 1 |
| PKS49 | 4 | 1 |
| PKS54 | 0 | 2 |
| PKS56 | 0 | 1 |
| PKS57 | 0 | 1 |
| PKS58 | 0 | 5 |
| PKS61 | 0 | 14 |

[0376] These results are extremely promising for the Type 3 PKS sequences evaluated in this cell type. Cells not shown in Table 28 did not produce detectable quantities of polyketide under the experimental conditions described. However, with minor adjustments to conditions, and/or in different host cells, the other Type 3 PKS sequences may produce polyketide product from a fatty acid-CoA and extender unit comprising an acetoacetyl moiety (such as malonyl-CoA) starting materials.

### Example 5

[0377] Production of Cannabigerolic Acid (CBGa) in Recombinant Yeast Transformed with Type 3 PKS

[0378] This examples describes the production of cannabigerolic acid (CBGa) in vivo in a Saccharomyces cerevisiae strain that is capable of prenylating polyketides. The strain is one that is genetically modified with Type 3 PKS to produce the polyketide precursor of CBGa: olivetolic acid. Further, the strain is one capable of producing the monoterpene precursor geranyl pyrophosphate (GPP) as the prenyl moiety for the prenyltransferase reaction that leads to CBGa production. Please refer to FIG. 4 for a schematic overview of the native biosynthetic pathway for cannabinoid production in Cannabis sativa, in which the production of cannabigerolic acid, as well as cannabidiolic acid and tetrahydrocannabinolic acid is shown.

[0379] FIG. 21 illustrates an overview of a possible metabolic pathway in a yeast cell transformed with Type 3 PKS in the production of cannabigerolic acid, according to this example, as well as downstream formation of cannabidiolic acid and tetrahydrocannabinolic acid. Type 3 PKS (1) as described herein, and olivetolic acid cyclase (OAC) from C. sativa (2) are used to produce olivetolic acid via hexanoyl-CoA and malonyl-CoA. Geranyl pyrophosphate (GPP) from the yeast terpenoid pathway and olivetolic acid (OLA) are subsequently converted to cannabigerolic acid using a prenyltransferase (3). Cannabigerolic acid is then further cyclized to produce THCa or CBDa using C. sativa Tetrahydrocannabinolic Acid (THCa) synthase (5) or cannabidiolic acid (CBDa) synthase (4) enzymes, respectively.

[0380] In this Example, the base strain used may be HB144 Saccharomyces cerevisiae having genotype CEN.PK2; ΔLEU2; ΔURA3; Erg20K197E::KanMx;ALD6; ASC1L641P; NPGA; MAF1; PGK1p:ACC1S659A, S1157A; tHMGR1;ID.

[0381] The base strain may be transformed with one or more vectors, such as a plasmid containing at least the nucleotide sequence encoding a Type 3 PKS according to any one of SEQ ID NO: 120 to SEQ ID NO: 137.

[0382] The modified S. cerevisiae strain used as disclosed herein under conditions conducive to cannabinoid formation. A 6-carbon fatty acid-CoA substrate, hexanoyl-CoA, and an extender unit containing an acetoacetyl moiety (such as malonyl-CoA) may be provided, or the transformed cells may produce same intracellularly from a sugar substrate. The cells are cultured and maintained under conditions conducive to cannabinoid CBGa production.

[0383] The base strain may contain one or more genetic modifications that increase the available pool of hexanoyl-CoA and malonyl-CoA in the cell. For example, the native S. cerevisiae acetoacetyl-CoA carboxylase, ACC1, protein may also be overexpressed by changing its promoter to a constitutive promoter, and may have additional mutations, such as S659A and S1 157A in ACC1 in order to alleviate negative regulation by post-translational modification (Shi et al., 2014), which can thereby permit the cell to have a greater accumulation of malonyl-CoA. A greater accumulation of malonyl-CoA provides additional substrate to the type 3 PKS enzyme, and thus can enhance olivetolic acid production in the cell.

[0384] Genetic manipulations of the base strain HB144, may be conducted in a known manner, to develop transformed yeast cells. DNA may be transformed into the base strain using the Gietz et al. transformation protocol (Gietz, 2014). Plas 36 may be used for CRISPR-based genetic modifications (Ryan et al., 2016). Sequences according to any one of SEQ ID NO:120 to SEQ ID No:137 can thus be inserted into the host yeast cell to create a strain containing type 3 PKS that can synthesize CBGa either directly from glucose, or from other primer and/or extender units provided to the cell, with enhanced polyketide synthesis.

[0385] Host cells, such as yeast cells, transformed in this way may be used to produce phytocannabinoids or phytocannabinoid derivatives.

### Examples 6 to 11

[0386] Methods and Cell Lines for the Production of Polyketides

[0387] Introduction. Rationale, background, and common methodologies for Examples 6 to 11 are described herein below. In Examples 4 and 5, above, polyketide synthases are described that can produce olivetol when expressed in E. coli. In Examples 6 to 11, a PKSIII library is provided, which is also active in S. cerevisiae, and can produce olivetol and olivetolic acid when fed hexanoic acid and expressed with an appropriate acyl-CoA synthase and polyketide cyclase.

[0388] Due to the promiscuous nature of PKSIII enzymes, other starter units can also be accepted in place of hexanoyl-CoA yielding a variety of carbon tails in the resultant polyketides. As an example, it is shown here that the production of THCVa by feeding butyric acid to a novel polyketide synthase co-expressed with the appropriate C. sativa enzymes (FIG. 22). This process is analogous to the production of THCa using hexanoic acid.

[0389] FIG. 22 is a schematic illustration of the production of THCVa in S. cerevisiae using a polyketide synthase as described herein.

[0390] The polyketide synthases described in Examples 4 and 5 are also capable of forming products using other fatty acid feeds. In the current examples, a polyketide library is described that can accept octanoic acid, hexenoic and hexynoic acid (structures in Table 29). When co-expressed with an acyl-CoA synthase and polyketide cyclase it is shown herein how that these enzymes produce the corresponding polyketide acid. Prenyltransferases from C. sativa (PT254), stachybotrys (PT72+273), or R. dauricum (PT104) can then be used to convert these products to the corresponding cannabinoids. Herein is shown the production of C7-alkyl resorcylic acid, C5-alkenyl cannabigerolic acid and C5-alkynyl resorcylic acid. Structures of polyketides and cannabinoid products generated by providing octanoic, hexenoic or hexynoic acid, in Examples 6 to 11 are shown below.

[chemical structure]

TABLE 29
Structure And Concentration Of Fatty Acids Fed For In Vivo Assays

| | | Concentration of acid | | |
|---|---|---|---|---|
| Fed assay | Acid structure | in assay | | Experiment Fed |
| Butyric acid | [chemical structure] | 5 | mM | Example 7 and Example 11 |
| Hexanoic acid | [chemical structure] | 1 | mM | Example 6 |
| Octanoic acid | [chemical structure] | 0.3 | mM | Example 8 |
| Hexynoic acid | [chemical structure] | 1 | mM | Example 9 |
| Hexenoic acid | [chemical structure] | 1 | mM | Example 10 |

[0391] An additional set of polyketide and acyl-CoA synthases are provided, and these Examples show that they can be used to improve THCVa titres. An expanded set of polyketide synthases (PKS80 to PKS109) and acyl-CoA synthases (Alk1 to Alk30) are provided. These synthases are transformed these into strains engineered to produce THCVa. It is established in these Examples that the expression of many of these enzymes greatly improved final cannabinoid titres.

[0392] Table 30 lists the modifications to the base strains used in Examples 6 to 11, as well as providing sequences.

TABLE 30
Modifications to base strains used in Examples 6 to 11

| | | Integration | | Genetic |
|---|---|---|---|---|
| Modification | SEQ | Region/ | | Structure of |
| name | ID NO. | Plasmid | Description | Sequence |
| (#1) | SEQ ID | USER site | CSAAE (Stout et al., 2012) is a C. sativa | XI-2up::pGAL-CSAAE1- |
| CSAAE1 | NO. 271 | XI-2 | enzyme that catalyzes the formation of | cyc::XI-2up |
| | | integration | fatty acyl-Coa's from free fatty acids. It | |
| | | | has demonstrated activity on hexanoic | |
| | | | and butyric acid | |
| (#2) | SEQ ID | Flagfeldt site | PC20 (Gagne et al., 2012) is a C. sativa | Fgf16::pGAL-PC20- |
| PC20 | NO. 272 | 16 integration | enzyme that is required for olivetolic acid | cyc::FgF16 |
| | | | formation | |
| (#3a) | SEQ ID | Flagfeldt site | PT254 (Luo et al., 2019) is a C. sativa | Fgf20::pGAL- |
| PT254 | NO. 279 | 20 integration | enzyme that prenylates olivetolic acid to | PT254-cyc::Fgf20 |
| | | | form cannabigerolic acid. It contains a 76 | |
| | | | amino acid truncation at the N-terminal | |
| (#3b) | SEQ ID | X-4 | PT72 is a Stachybotrys bisby enzyme that | Fgf20::pGAL-PT72- |
| PT72 | NO. 280 | integration | prenylates olivetolic acid to form | cyc::Fgf20 |
| | | site | cannabigerolic acid | |
| (#3c) | SEQ ID | X-4 | PT104 is a Rhododendron dauricum | Fgf20::pGAL- |
| PT104 | NO. 281 | integration | enzyme that prenylates olivetolic acid to | PT104-cyc::Fgf20 |
| | | site | form cannabigerolic acid. Contains a 34 | |
| | | | amino acid truncation at the N-terminal. | |
| (#3d) | SEQ ID | X-4 | PT273 is a Stachybotrys chlorohalonata | Fgf20::pGAL- |
| PT273 | NO. 282 | integration | enzyme that prenylates olivetolic acid to | PT274-cyc::Fgf20 |
| | | site | form cannabigerolic acid | |
| (#11) | SEQ ID | Apel-3 | OXC155 is a modified THCa synthase | Apel-3::OXC155- |
| OXC155 | NO. 273 | integration | from C. sativa. A 5′ OST-proAF tag has | cyc::Apel-3 |
| | | | been added to this gene. This enzyme will | |
| | | | produce THCa from a CBGa precursor | |

TABLE 31
Plasmids used in Examples 6-11

| # | Plasmid Name | Description | Selection | Backbone |
|---|---|---|---|---|
| 1 | PLAS400 | Gal1p:RFP:Cyc1t | Uracil | pYES-URA |
| 2 | PLAS434 | Gal1p:PKS13:Cyc1t | Uracil | pYES-URA |
| 3 | PLAS435 | Gal1p:PKS14:Cyc1t | Uracil | pYES-URA |
| 4 | PLAS436 | Gal1p:PKS47:Cyc1t | Uracil | pYES-URA |
| 5 | PLAS437 | Gal1p:PKS49:Cyc1t | Uracil | pYES-URA |
| 6 | PLAS438 | Gal1p:PKS72:Cyc1t | Uracil | pYES-URA |
| 7 | PLAS439 | Gal1p:PKS73:Cyc1t | Uracil | pYES-URA |
| 8 | PLAS440 | Gal1p:PKS74:Cyc1t | Uracil | pYES-URA |
| 9 | PLAS441 | Gal1p:PKS45:Cyc1t | Uracil | pYES-URA |
| 10 | PLAS442 | Gal1p:PKS65:Cyc1t | Uracil | pYES-URA |
| 11 | PLAS469 | pGAL:Alk27:Cyct | Uracil | pYES-URA |
| 12 | PLAS492 | pGAL:PKS92:Cyct | Uracil | pYES-URA |
| 13 | PLAS493 | pGAL:PKS100:Cyct | Uracil | pYES-URA |
| 14 | PLAS501 | pGAL:PKS108:Cyct | Uracil | pYES-URA |
| 15 | PLAS462 | pGAL:Alk20:Cyct | Uracil | pYES-URA |
| 16 | PLAS470 | pGAL:Alk28:Cyct | Uracil | pYES-URA |
| 17 | PLAS478 | pGAL:PKS85:Cyct | Uracil | pYES-URA |
| 18 | PLAS486 | pGAL:PKS93:Cyct | Uracil | pYES-URA |
| 19 | PLAS494 | pGAL:PKS101:Cyct | Uracil | pYES-URA |
| 20 | PLAS502 | pGAL:PKS109:Cyct | Uracil | pYES-URA |
| 21 | PLAS463 | pGAL:Alk21:Cyct | Uracil | pYES-URA |
| 22 | PLAS471 | pGAL:Alk29:Cyct | Uracil | pYES-URA |
| 23 | PLAS479 | pGAL:PKS86:Cyct | Uracil | pYES-URA |
| 24 | PLAS487 | pGAL:PKS94:Cyct | Uracil | pYES-URA |
| 25 | PLAS495 | pGAL:PKS102:Cyct | Uracil | pYES-URA |
| 26 | PLAS464 | pGAL:Alk22:Cyct | Uracil | pYES-URA |
| 27 | PLAS472 | pGAL:Alk30:Cyct | Uracil | pYES-URA |
| 28 | PLAS480 | pGAL:PKS87:Cyct | Uracil | pYES-URA |
| 29 | PLAS467 | pGAL:Alk25:Cyct | Uracil | pYES-URA |
| 30 | PLAS475 | pGAL:PKS82:Cyct | Uracil | pYES-URA |
| 31 | PLAS483 | pGAL:PKS90:Cyct | Uracil | pYES-URA |
| 32 | PLAS491 | pGAL:PKS98:Cyct | Uracil | pYES-URA |
| 33 | PLAS499 | pGAL:PKS106:Cyct | Uracil | pYES-URA |
| 34 | PLAS468 | pGAL:Alk26:Cyct | Uracil | pYES-URA |
| 35 | PLAS476 | pGAL:PKS83:Cyct | Uracil | pYES-URA |
| 36 | PLAS484 | pGAL:PKS91:Cyct | Uracil | pYES-URA |
| 37 | PLAS492 | pGAL:PKS99:Cyct | Uracil | pYES-URA |
| 38 | PLAS500 | pGAL:PKS107:Cyct | Uracil | pYES-URA |
| 39 | PLAS443 | pGAL:Alk1:Cyct | Uracil | pYES-URA |
| 40 | PLAS444 | pGAL:Alk2:Cyct | Uracil | pYES-URA |
| 41 | PLAS445 | pGAL:Alk3:Cyct | Uracil | pYES-URA |
| 42 | PLAS446 | pGAL:Alk4:Cyct | Uracil | pYES-URA |
| 43 | PLAS447 | pGAL:Alk5:Cyct | Uracil | pYES-URA |
| 44 | PLAS448 | pGAL:Alk6:Cyct | Uracil | pYES-URA |
| 45 | PLAS449 | pGAL:Alk7:Cyct | Uracil | pYES-URA |
| 46 | PLAS450 | pGAL:Alk8:Cyct | Uracil | pYES-URA |
| 47 | PLAS451 | pGAL:Alk9:Cyct | Uracil | pYES-URA |
| 48 | PLAS452 | pGAL:Alk10:Cyct | Uracil | pYES-URA |
| 49 | PLAS453 | pGAL:Alk11 :Cyct | Uracil | pYES-URA |
| 50 | PLAS454 | pGAL:Alk12:Cyct | Uracil | pYES-URA |
| 51 | PLAS455 | pGAL:Alk13:Cyct | Uracil | pYES-URA |
| 52 | PLAS456 | pGAL:Alk14:Cyct | Uracil | pYES-URA |
| 53 | PLAS457 | pGAL:Alk15:Cyct | Uracil | pYES-URA |
| 54 | PLAS458 | pGAL:Alk16:Cyct | Uracil | pYES-URA |
| 55 | PLAS459 | pGAL:Alk17:Cyct | Uracil | pYES-URA |
| 56 | PLAS460 | pGAL:Alk18:Cyct | Uracil | pYES-URA |
| 57 | PLAS461 | pGAL:Alk19:Cyct | Uracil | pYES-URA |

TABLE 32
Strains used in Examples 6 to 11

| Strain # | Background | Plasmids | Genotype | Notes |
|---|---|---|---|---|
| HB144 | -URA, -LEU | None | Saccharomyces cerevisiae | Base strain |
| | | | CEN.PK2; ΔLEU2; ΔURA3; | |
| | | | Erg20K197E::KanMx; | |
| | | | ALD6; ASC1L641P; NPGA; | |
| | | | MAF1; PGK1p:Acc1 | |
| HB1629 | -URA, -LEU | None | Saccharomyces cerevisiae | Host strain |
| | | | CEN.PK2; ΔLEU2; ΔURA3; | expressing PT273 |
| | | | Erg20K197E::KanMx; ALD6; | used in fatty acid |
| | | | ASC1L641P; NPGA; MAF1; | feeding assay for |
| | | | PGK1p:Acc1; tHMGR1; IDI; | the production of |
| | | | CsAAE1; PC20; PT273 | alkyl variant |
| | | | | cannabinoids |
| HB1630 | -URA, -LEU | None | Saccharomyces cerevisiae | Host strain |
| | | | CEN.PK2; ΔLEU2; ΔURA3; | expressing PT72 |
| | | | Erg20K197E::KanMx; ALD6; | used in fatty acid |
| | | | ASC1L641P; NPGA; MAF1; | feeding assay for |
| | | | PGK1p:Acc1; tHMGR1; IDI; | the production of |
| | | | CsAAE1; PC20; PT72 | alkyl variant |
| | | | | cannabinoids |
| HB1631 | -URA, -LEU | None | Saccharomyces cerevisiae | Host strain |
| | | | CEN.PK2; ΔLEU2; ΔURA3; | expressing PT104 |
| | | | Erg20K197E::KanMx; ALD6; | used in fatty acid |
| | | | ASC1L641P; NPGA; MAF1; | feeding assay for |
| | | | PGK1p:Acc1; tHMGR1; IDI; | the production of |
| | | | CsAAE1; PC20; PT104 | alkyl variant |
| | | | | cannabinoids |
| HB1632 | -URA, -LEU | None | Saccharomyces cerevisiae | Host strain |
| | | | CEN.PK2; ΔLEU2; ΔURA3; | expressing PT254 |
| | | | Erg20K197E::KanMx; ALD6; | used in fatty acid |
| | | | ASC1L641P; NPGA; MAF1; | feeding assay for |
| | | | PGK1p:Acc1; tHMGR1; IDI; | the production of |
| | | | CsAAE1; PC20; PT254 | alkyl variant |
| | | | | cannabinoids |
| HB1629- | -URA, -LEU | PLAS434 | Saccharomyces cerevisiae | Expresses PKS13 |
| PKS13 | | | CEN.PK2; ΔLEU2; ΔURA3; | |
| | | | Erg20K197E::KanMx; ALD6; | |
| | | | ASC1L641P; NPGA; MAF1; | |
| | | | PGK1p:Acc1; tHMGR1; IDI | |
| | | | CsAAE1; PC20; PT273 | |
| HB1629- | -URA, -LEU | PLAS435 | Saccharomyces cerevisiae | Expresses PKS14 |
| PKS14 | | | CEN.PK2; ΔLEU2; ΔURA3; | |
| | | | Erg20K197E::KanMx; ALD6; | |
| | | | ASC1L641P; NPGA; MAF1; | |
| | | | PGK1p:Acc1; tHMGR1; IDI | |
| | | | CsAAE1; PC20; PT273 | |
| HB1629- | -URA, -LEU | PLAS436 | Saccharomyces cerevisiae | Expresses PKS47 |
| PKS47 | | | CEN.PK2; ΔLEU2; ΔURA3; | |
| | | | Erg20K197E::KanMx; ALD6; | |
| | | | ASC1L641P; NPGA; MAF1; | |
| | | | PGK1p:Acc1; tHMGR1; IDI | |
| | | | CsAAE1; PC20; PT273 | |
| HB1629- | -URA, -LEU | PLAS437 | Saccharomyces cerevisiae | Expresses PKS49 |
| PKS49 | | | CEN.PK2; ΔLEU2; ΔURA3; | |
| | | | Erg20K197E::KanMx; ALD6; | |
| | | | ASC1L641P; NPGA; MAF1; | |
| | | | PGK1p:Acc1; tHMGR1; IDI | |
| | | | e CsAAE1; PC20; PT273 | |
| HB1629- | -URA, -LEU | PLAS442 | Saccharomyces cerevisiae | Expresses PKS65 |
| PKS65 | | | CEN.PK2; ΔLEU2; ΔURA3; | |
| | | | Erg20K197E::KanMx; ALD6; | |
| | | | ASC1L641P; NPGA; MAF1; | |
| | | | PGK1p:Acc1; tHMGR1; IDI | |
| | | | CsAAE1; PC20; PT273 | |
| H1B1630- | -URA, -LEU | PLAS441 | Saccharomyces cerevisiae | Expresses PKS45 |
| PKS45 | | | CEN.PK2; ΔLEU2; ΔURA3; | |
| | | | Erg20K197E::KanMx; ALD6; | |
| | | | ASC1L641P; NPGA; MAF1; | |
| | | | PGK1p:Acc1; tHMGR1; IDI | |
| | | | CsAAE1; PC20; PT72 | |
| HB1631- | -URA, -LEU | PLAS434 | Saccharomyces cerevisiae | Expresses PKS13 |
| PKS13 | | | CEN.PK2; ΔLEU2; ΔURA3; | |
| | | | Erg20K197E::KanMx; ALD6; | |
| | | | ASC1L641P; NPGA; MAF1; | |
| | | | PGK1p:Acc1; tHMGR1; IDI | |
| | | | CsAAE1; PC20; PT104 | |
| HB1631- | -URA, -LEU | PLAS435 | Saccharomyces cerevisiae | Expresses PKS14 |
| PKS14 | | | CEN.PK2; ΔLEU2; ΔURA3; | |
| | | | Erg20K197E::KanMx; ALD6; | |
| | | | ASC1L641P; NPGA; MAF1; | |
| | | | PGK1p:Acc1; tHMGR1; IDI | |
| | | | CsAAE1; PC20; PT104 | |
| HB1631- | -URA, -LEU | PLAS441 | Saccharomyces cerevisiae | Expresses PKS45 |
| PKS45 | | | CEN.PK2; ΔLEU2; ΔURA3; | |
| | | | Erg20K197E::KanMx; ALD6; | |
| | | | ASC1L641P; NPGA; MAF1; | |
| | | | PGK1p:Acc1; tHMGR1; IDI | |
| | | | CsAAE1; PC20; PT104 | |
| HB1632- | -URA, -LEU | PLAS434 | Saccharomyces cerevisiae | Expresses PKS13 |
| PKS13 | | | CEN.PK2; ΔLEU2; ΔURA3; | |
| | | | Erg20K197E::KanMx; ALD6; | |
| | | | ASC1L641P; NPGA; MAF1; | |
| | | | PGK1p:Acc1; tHMGR1; IDI | |
| | | | CsAAE1; PC20; PT254 | |
| HB1632- | -URA, -LEU | PLAS435 | Saccharomyces cerevisiae | Expresses PKS14 |
| PKS14 | | | CEN.PK2; ΔLEU2; ΔURA3; | |
| | | | Erg20K197E::KanMx; ALD6; | |
| | | | ASC1L641P; NPGA; MAF1; | |
| | | | PGK1p:Acc1; tHMGR1; IDI | |
| | | | CsAAEI; PT254 | |
| HB1632- | -URA, -LEU | PLAS439 | Saccharomyces cerevisiae | Expresses PKS73 |
| PKS73 | | | CEN.PK2; ΔLEU2; ΔURA3; | |
| | | | Erg20K197E::KanMx; ALD6; | |
| | | | ASC1L641P; NPGA; MAF1; | |
| | | | PGK1p:Acc1; tHMGR1; IDI | |
| | | | CsAAEI; PT254 | |
| HB1521 | -URA, -LEU | None | Saccharomyces cerevisiae | Parent strain for in |
| | | | CEN.PK2; ΔLEU2; ΔURA3; | hexanoic acid |
| | | | Erg20K197E::KanMx; ALD6; | feeding assay |
| | | | ASC1L641P; NPGA; MAF1; | |
| | | | PGK1p:Acc1; tHMGR1; IDI | |
| | | | CSAAE1; PC20 | |
| HB1521- | -URA, -LEU | PLAS434 | Saccharomyces cerevisiae | Produces olivetol |
| PKS13 | | | CEN.PK2; ΔLEU2; ΔURA3; | and olivetolic acid |
| | | | Erg20K197E::KanMx; ALD6; | when fed with |
| | | | ASC1L641P; NPGA; MAF1; | hexanoic acid |
| | | | PGK1p:Acc1; tHMGR1; IDI | |
| | | | CSAAE1; PC20 | |
| HB1521- | -URA, -LEU | PLAS435 | Saccharomyces cerevisiae | Produces olivetol |
| PKS14 | | | CEN.PK2; ΔLEU2; ΔURA3; | and olivetolic acid |
| | | | Erg20K197E::KanMx; ALD6; | when fed with |
| | | | ASC1L641P; NPGA; MAF1; | hexanoic acid |
| | | | PGK1p:Acc1; tHMGR1; IDI | |
| | | | CSAAE1; PC20 | |
| HB1521- | -URA, -LEU | PLAS436 | Saccharomyces cerevisiae | Produces olivetol |
| PKS47 | | | CEN.PK2; ΔLEU2; ΔURA3; | and olivetolic acid |
| | | | Erg20K197E::KanMx; ALD6; | when fed with |
| | | | ASC1L641P; NPGA; MAF1; | hexanoic acid |
| | | | PGK1p:Acc1; tHMGR1; IDI | |
| | | | CSAAE1; PC20 | |
| HB1521- | -URA, -LEU | PLAS437 | Saccharomyces cerevisiae | Produces olivetol |
| PKS49 | | | CEN.PK2; ΔLEU2; ΔURA3; | and olivetolic acid |
| | | | Erg20K197E::KanMx; ALD6; | when fed with |
| | | | ASC1L641P; NPGA; MAF1; | hexanoic acid |
| | | | PGK1p:Acc1; tHMGR1; IDI | |
| | | | CSAAE1; PC20 | |
| HB1521- | -URA, -LEU | PLAS438 | Saccharomyces cerevisiae | Produces olivetol |
| PKS72 | | | CEN.PK2; ΔLEU2; ΔURA3; | and olivetolic acid |
| | | | Erg20K197E::KanMx; ALD6; | when fed with |
| | | | ASC1L641P; NPGA; MAF1; | hexanoic acid |
| | | | PGK1p:Acc1; tHMGR1; IDI | |
| | | | CSAAE1; PC20 | |
| HB1521- | -URA, -LEU | PLAS439 | Saccharomyces cerevisiae | Produces olivetol |
| PKS73 | | | CEN.PK2; ΔLEU2; ΔURA3; | and olivetolic acid |
| | | | Erg20K197E::KanMx; ALD6; | when fed with |
| | | | ASC1L641P; NPGA; MAF1; | hexanoic acid |
| | | | PGK1p:Acc1; tHMGR1; IDI | |
| | | | CSAAE1; PC20 | |
| HB1521- | -URA, -LEU | PLAS440 | Saccharomyces cerevisiae | Produces olivetol |
| PKS74 | | | CEN.PK2; ΔLEU2; ΔURA3; | and olivetolic acid |
| | | | Erg20K197E::KanMx; ALD6; | when fed with |
| | | | ASC1L641P; NPGA; MAF1; | hexanoic acid |
| | | | PGK1p:Acc1; tHMGR1; IDI | |
| | | | CSAAE1; PC20 | |
| HB1521- | -URA, -LEU | PLAS400 | Saccharomyces cerevisiae | Negative control for |
| RFP | | | CEN.PK2; ΔLEU2; ΔURA3; | hexanoic acid |
| | | | Erg20K197E::KanMx; ALD6; | feeding |
| | | | ASC1L641P; NPGA; MAF1; | |
| | | | PGK1p:Acc1; tHMGR1; IDI | |
| | | | CSAAE1; PC20 | |
| HB1775- | -URA, -LEU | PLAS400 | Saccharomyces cerevisiae | Produces THCVa |
| RFP | | | CEN.PK2; ΔLEU2; ΔURA3; | when fed butyric |
| | | | Erg20K197E::KanMx; ALD6; | acid |
| | | | ASC1L641P; NPGA; MAF1; | |
| | | | PGK1p:Acc1; tHMGR1; IDI | |
| | | | CSAAE1; PC20; PT254; OXC155 | |
| HB144- | -URA, -LEU | PLAS400 | Saccharomyces cerevisiae | Produces THCVa |
| RFP | | | CEN.PK2; ΔLEU2; ΔURA3; | when fed hexanoic |
| | | | Erg20K197E::KanMx; ALD6; | acid |
| | | | ASC1L641P; NPGA; MAF1; | |
| | | | PGK1p:Acc1 | |
| HB1775- | URA, -LEU | PLAS469 | Saccharomyces cerevisiae | Alk27 |
| Alk27 | | | CEN.PK2; ΔLEU2; ΔURA3; | overexpression |
| | | | Erg20K197E::KanMx; ALD6; | |
| | | | ASC1L641P; NPGA; MAF1; | |
| | | | PGK1p:Acc1; tHMGR1; IDI | |
| | | | CSAAE1; PC20; PT254; OXC155 | |
| HB1775- | URA, -LEU | PLAS492 | Saccharomyces cerevisiae | PKS92 |
| PKS92 | | | CEN.PK2; ΔLEU2; ΔURA3; | overexpression |
| | | | Erg20K197E::KanMx; ALD6; | |
| | | | ASC1L641P; NPGA; MAF1; | |
| | | | PGK1p:Acc1; tHMGR1; IDI | |
| | | | CSAAE1; PC20; PT254; OXC155 | |
| HB1775- | URA, -LEU | PLAS493 | Saccharomyces cerevisiae | PKS100 |
| PKS100 | | | CEN.PK2; ΔLEU2; ΔURA3; | overexpression |
| | | | Erg20K197E::KanMx; ALD6; | |
| | | | ASC1L641P; NPGA; MAF1; | |
| | | | PGK1p:Acc1; tHMGR1; IDI | |
| | | | CSAAE1; PC20; PT254; OXC155 | |
| HB1775- | URA, -LEU | PLAS501 | Saccharomyces cerevisiae | PKS108 |
| PKS108 | | | CEN.PK2; ΔLEU2; ΔURA3; | overexpression |
| | | | Erg20K197E::KanMx; ALD6; | |
| | | | ASC1L641P; NPGA; MAF1; | |
| | | | PGK1p:Acc1; tHMGR1; IDI | |
| | | | CSAAE1; PC20; PT254; OXC155 | |
| HB1775- | URA, -LEU | PLAS462 | Saccharomyces cerevisiae | Alk20 |
| Alk20 | | | CEN.PK2; ΔLEU2; ΔURA3; | overexpression |
| | | | Erg20K197E::KanMx; ALD6; | |
| | | | ASC1L641P; NPGA; MAF1; | |
| | | | PGK1p:Acc1; tHMGR1; IDI | |
| | | | CSAAE1; PC20; PT254; OXC155 | |
| HB1775- | URA, -LEU | PLAS470 | Saccharomyces cerevisiae | Alk28 |
| Alk28 | | | CEN.PK2; ΔLEU2; ΔURA3; | overexpression |
| | | | Erg20K197E::KanMx; ALD6; | |
| | | | ASC1L641P; NPGA; MAF1; | |
| | | | PGK1p:Acc1; tHMGR1; IDI | |
| | | | CSAAE1; PC20; PT254; OXC155 | |
| HB1775- | URA, -LEU | PLAS478 | Saccharomyces cerevisiae | PKS85 |
| PKS85 | | | CEN.PK2; ΔLEU2; ΔURA3; | overexpression |
| | | | Erg20K197E::KanMx; ALD6; | |
| | | | ASC1L641P; NPGA; MAF1; | |
| | | | PGK1p:Acc1; tHMGR1; IDI | |
| | | | CSAAE1; PC20; PT254; OXC155 | |
| HB1775- | URA, -LEU | PLAS486 | Saccharomyces cerevisiae | PKS93 |
| PKS93 | | | CEN.PK2; ΔLEU2; ΔURA3; | overexpression |
| | | | Erg20K197E::KanMx; ALD6; | |
| | | | ASC1L641P; NPGA; MAF1; | |
| | | | PGK1p:Acc1; tHMGR1; IDI | |
| | | | CSAAE1; PC20; PT254; OXC155 | |
| HB1775- | URA, -LEU | PLAS494 | Saccharomyces cerevisiae | PKS101 |
| PKS101 | | | CEN.PK2; ΔLEU2; ΔURA3; | overexpression |
| | | | Erg20K197E::KanMx; ALD6; | |
| | | | ASC1L641P; NPGA; MAF1; | |
| | | | PGK1p:Acc1; tHMGR1; IDI | |
| | | | CSAAE1; PC20; PT254; OXC155 | |
| HB1775- | URA, -LEU | PLAS502 | Saccharomyces cerevisiae | PKS109 |
| PKS109 | | | CEN.PK2; ΔLEU2; ΔURA3; | overexpression |
| | | | Erg20K197E::KanMx; ALD6; | |
| | | | ASC1L641P; NPGA; MAF1; | |
| | | | PGK1p:Acc1; tHMGR1; IDI | |
| | | | CSAAE1; PC20; PT254; OXC155 | |
| HB1775- | URA, -LEU | PLAS463 | Saccharomyces cerevisiae | Alk21 |
| Alk21 | | | CEN.PK2; ΔLEU2; ΔURA3; | overexpression |
| | | | Erg20K197E::KanMx; ALD6; | |
| | | | ASC1L641P; NPGA; MAF1; | |
| | | | PGK1p:Acc1; tHMGR1; IDI | |
| | | | CSAAE1; PC20; PT254; OXC155 | |
| HB1775- | URA, -LEU | PLAS471 | Saccharomyces cerevisiae | Alk29 |
| Alk29 | | | CEN.PK2; ΔLEU2; ΔURA3; | overexpression |
| | | | Erg20K197E::KanMx; ALD6; | |
| | | | ASC1L641P; NPGA; MAF1; | |
| | | | PGK1p:Acc1; tHMGR1; IDI | |
| | | | CSAAE1; PC20; PT254; OXC155 | |
| HB1775- | URA, -LEU | PLAS479 | Saccharomyces cerevisiae | PKS86 |
| PKS86 | | | CEN.PK2; ΔLEU2; ΔURA3; | overexpression |
| | | | Erg20K197E::KanMx; ALD6; | |
| | | | ASC1L641P; NPGA; MAF1; | |
| | | | PGK1p:Acc1; tHMGR1; IDI | |
| | | | CSAAE1; PC20; PT254; OXC155 | |
| HB1775- | URA, -LEU | PLAS487 | Saccharomyces cerevisiae | PKS94 |
| PKS94 | | | CEN.PK2; ΔLEU2; ΔURA3; | overexpression |
| | | | Erg20K197E::KanMx; ALD6; | |
| | | | ASC1L641P; NPGA; MAF1; | |
| | | | PGK1p:Acc1; tHMGR1; IDI | |
| | | | CSAAE1; PC20; PT254; OXC155 | |
| HB1775- | URA, -LEU | PLAS495 | Saccharomyces cerevisiae | PKS102 |
| PKS102 | | | CEN.PK2; ΔLEU2; ΔURA3; | overexpression |
| | | | Erg20K197E::KanMx; ALD6; | |
| | | | ASC1L641P; NPGA; MAF1; | |
| | | | PGK1p:Acc1; tHMGR1; IDI | |
| | | | CSAAE1; PC20; PT254; OXC155 | |
| HB1775- | URA, -LEU | PLAS464 | Saccharomyces cerevisiae | Alk22 |
| Alk22 | | | CEN.PK2; ΔLEU2; ΔURA3; | overexpression |
| | | | Erg20K197E::KanMx; ALD6; | |
| | | | ASC1L641P; NPGA; MAF1; | |
| | | | PGK1p:Acc1; tHMGR1; IDI | |
| | | | CSAAE1; PC20; PT254; OXC155 | |
| HB1775- | URA, -LEU | PLAS472 | Saccharomyces cerevisiae | Alk30 |
| Alk30 | | | CEN.PK2; ΔLEU2; ΔURA3; | overexpression |
| | | | Erg20K197E::KanMx; ALD6; | |
| | | | ASC1L641P; NPGA; MAF1; | |
| | | | PGK1p:Acc1; tHMGR1; IDI | |
| | | | CSAAE1; PC20; PT254; OXC155 | |
| HB1775- | URA, -LEU | PLAS480 | Saccharomyces cerevisiae | PKS87 |
| PKS87 | | | CEN.PK2; ΔLEU2; ΔURA3; | overexpression |
| | | | Erg20K197E::KanMx; ALD6; | |
| | | | ASC1L641P; NPGA; MAF1; | |
| | | | PGK1p:Acc1; tHMGR1; IDI | |
| | | | CSAAE1; PC20; PT254; OXC155 | |
| HB1775- | URA, -LEU | PLAS467 | Saccharomyces cerevisiae | Alk25 |
| Alk25 | | | CEN.PK2; ΔLEU2; ΔURA3; | overexpression |
| | | | Erg20K197E::KanMx; ALD6; | |
| | | | ASC1L641P; NPGA; MAF1; | |
| | | | PGK1p:Acc1; tHMGR1; IDI | |
| | | | CSAAE1; PC20; PT254; OXC155 | |
| HB1775- | URA, -LEU | PLAS475 | Saccharomyces cerevisiae | PKS82 |
| PKS82 | | | CEN.PK2; ΔLEU2; ΔURA3; | overexpression |
| | | | Erg20K197E::KanMx; ALD6; | |
| | | | ASC1L641P; NPGA; MAF1; | |
| | | | PGK1p:Acc1; tHMGR1; IDI | |
| | | | CSAAE1; PC20; PT254; OXC155 | |
| HB1775- | URA, -LEU | PLAS483 | Saccharomyces cerevisiae | PKS90 |
| PKS90 | | | CEN.PK2; ΔLEU2; ΔURA3; | overexpression |
| | | | Erg20K197E::KanMx; ALD6; | |
| | | | ASC1L641P; NPGA; MAF1; | |
| | | | PGK1p:Acc1; tHMGR1; IDI | |
| | | | CSAAE1; PC20; PT254; OXC155 | |
| HB1775- | URA, -LEU | PLAS491 | Saccharomyces cerevisiae | PKS98 |
| PKS98 | | | CEN.PK2; ΔLEU2; ΔURA3; | overexpression |
| | | | Erg20K197E::KanMx; ALD6; | |
| | | | ASC1L641P; NPGA; MAF1; | |
| | | | PGK1p:Acc1; tHMGR1; IDI | |
| | | | CSAAE1; PC20; PT254; OXC155 | |
| HB1775- | URA, -LEU | PLAS499 | Saccharomyces cerevisiae | PKS106 |
| PKS106 | | | CEN.PK2; ΔLEU2; ΔURA3; | overexpression |
| | | | Erg20K197E::KanMx; ALD6; | |
| | | | ASC1L641P; NPGA; MAF1; | |
| | | | PGK1p:Acc1; tHMGR1; IDI | |
| | | | CSAAE1; PC20; PT254; OXC155 | |
| HB1775- | URA, -LEU | PLAS468 | Saccharomyces cerevisiae | Alk26 |
| Alk26 | | | CEN.PK2; ΔLEU2; ΔURA3; | overexpression |
| | | | Erg20K197E::KanMx; ALD6; | |
| | | | ASC1L641P; NPGA; MAF1; | |
| | | | PGK1p:Acc1; tHMGR1; IDI | |
| | | | CSAAE1; PC20; PT254; OXC155 | |
| HB1775- | URA, -LEU | PLAS476 | Saccharomyces cerevisiae | PKS83 |
| PKS83 | | | CEN.PK2; ΔLEU2; ΔURA3; | overexpression |
| | | | Erg20K197E::KanMx; ALD6; | |
| | | | ASC1L641P; NPGA; MAF1; | |
| | | | PGK1p:Acc1; tHMGR1; IDI | |
| | | | CSAAE1; PC20; PT254; OXC155 | |
| HB1775- | URA, -LEU | PLAS484 | Saccharomyces cerevisiae | PKS91 |
| PKS91 | | | CEN.PK2; ΔLEU2; ΔURA3; | overexpression |
| | | | Erg20K197E::KanMx; ALD6; | |
| | | | ASC1L641P; NPGA; MAF1; | |
| | | | PGK1p:Acc1; tHMGR1; IDI | |
| | | | CSAAE1; PC20; PT254; OXC155 | |
| HB1775- | URA, -LEU | PLAS492 | Saccharomyces cerevisiae | PKS99 |
| PKS99 | | | CEN.PK2; ΔLEU2; ΔURA3; | overexpression |
| | | | Erg20K197E::KanMx; ALD6; | |
| | | | ASC1L641P; NPGA; MAF1; | |
| | | | PGK1p:Acc1; tHMGR1; IDI | |
| | | | CSAAE1; PC20; PT254; OXC155 | |
| HB1775- | URA, -LEU | PLAS500 | Saccharomyces cerevisiae | PKS107 |
| PKS107 | | | CEN.PK2; ΔLEU2; ΔURA3; | overexpression |
| | | | Erg20K197E::KanMx; ALD6; | |
| | | | ASC1L641P; NPGA; MAF1; | |
| | | | PGK1p:Acc1; tHMGR1; IDI | |
| | | | CSAAE1; PC20; PT254; OXC155 | |
| HB1775- | URA, -LEU | PLAS443 | Saccharomyces cerevisiae | Alk1 |
| Alk1 | | | CEN.PK2; ΔLEU2; ΔURA3; | overexpression |
| | | | Erg20K197E::KanMx; ALD6; | |
| | | | ASC1L641P; NPGA; MAF1; | |
| | | | PGK1p:Acc1; tHMGR1; IDI | |
| | | | CSAAE1; PC20; PT254; OXC155 | |
| HB1775- | URA, -LEU | PLAS444 | Saccharomyces cerevisiae | Alk2 |
| Alk2 | | | CEN.PK2; ΔLEU2; ΔURA3; | overexpression |
| | | | Erg20K197E::KanMx; ALD6; | |
| | | | ASC1L641P; NPGA; MAF1; | |
| | | | PGK1p:Acc1; tHMGR1; IDI | |
| | | | CSAAE1; PC20; PT254; OXC155 | |
| HB1775- | URA, -LEU | PLAS445 | Saccharomyces cerevisiae | Alk3 |
| Alk3 | | | CEN.PK2; ΔLEU2; ΔURA3; | overexpression |
| | | | Erg20K197E::KanMx; ALD6; | |
| | | | ASC1L641P; NPGA; MAF1; | |
| | | | PGK1p:Acc1; tHMGR1; IDI | |
| | | | CSAAE1; PC20; PT254; OXC155 | |
| HB1775- | URA, -LEU | PLAS446 | Saccharomyces cerevisiae | Alk4 |
| Alk4 | | | CEN.PK2; ΔLEU2; ΔURA3; | overexpression |
| | | | Erg20K197E::KanMx; ALD6; | |
| | | | ASC1L641P; NPGA; MAF1; | |
| | | | PGK1p:Acc1; tHMGR1; IDI | |
| | | | CSAAE1; PC20; PT254; OXC155 | |
| HB1775- | URA, -LEU | PLAS447 | Saccharomyces cerevisiae | Alk5 |
| Alk5 | | | CEN.PK2; ΔLEU2; ΔURA3; | overexpression |
| | | | Erg20K197E::KanMx; ALD6; | |
| | | | ASC1L641P; NPGA; MAF1; | |
| | | | PGK1p:Acc1; tHMGR1; IDI | |
| | | | CSAAE1; PC20; PT254; OXC155 | |
| HB1775- | URA, -LEU | PLAS448 | Saccharomyces cerevisiae | Alk6 |
| Alk6 | | | CEN.PK2; ΔLEU2; ΔURA3; | overexpression |
| | | | Erg20K197E::KanMx; ALD6; | |
| | | | ASC1L641P; NPGA; MAF1; | |
| | | | PGK1p:Acc1; tHMGR1; IDI | |
| | | | CSAAE1; PC20; PT254; OXC155 | |
| HB1775- | URA, -LEU | PLAS449 | Saccharomyces cerevisiae | Alk7 |
| Alk7 | | | CEN.PK2; ΔLEU2; ΔURA3; | overexpression |
| | | | Erg20K197E::KanMx; ALD6; | |
| | | | ASC1L641P; NPGA; MAF1; | |
| | | | PGK1p:Acc1; tHMGR1; IDI | |
| | | | CSAAE1; PC20; PT254; OXC155 | |
| HB1775- | URA, -LEU | PLAS450 | Saccharomyces cerevisiae | Alk8 |
| Alk8 | | | CEN.PK2; ΔLEU2; ΔURA3; | overexpression |
| | | | Erg20K197E::KanMx; ALD6; | |
| | | | ASC1L641P; NPGA; MAF1; | |
| | | | PGK1p:Acc1; tHMGR1; IDI | |
| | | | CSAAE1; PC20; PT254; OXC155 | |
| HB1775- | URA, -LEU | PLAS451 | Saccharomyces cerevisiae | Alk9 |
| Alk9 | | | CEN.PK2; ΔLEU2; ΔURA3; | overexpression |
| | | | Erg20K197E::KanMx; ALD6; | |
| | | | ASC1L641P; NPGA; MAF1; | |
| | | | PGK1p:Acc1; tHMGR1; IDI | |
| | | | CSAAE1; PC20; PT254; OXC155 | |
| HB1775- | URA, -LEU | PLAS452 | Saccharomyces cerevisiae | Alk10 |
| Alk10 | | | CEN.PK2; ΔLEU2; ΔURA3; | overexpression |
| | | | Erg20K197E::KanMx; ALD6; | |
| | | | ASC1L641P; NPGA; MAF1; | |
| | | | PGK1p:Acc1; tHMGR1; IDI | |
| | | | CSAAE1; PC20; PT254; OXC155 | |
| HB1775- | URA, -LEU | PLAS453 | Saccharomyces cerevisiae | Alk11 |
| Alk11 | | | CEN.PK2; ΔLEU2; ΔURA3; | overexpression |
| | | | Erg20K197E::KanMx; ALD6; | |
| | | | ASC1L641P; NPGA; MAF1; | |
| | | | PGK1p:Acc1; tHMGR1; IDI | |
| | | | CSAAE1; PC20; PT254; OXC155 | |
| HB1775- | URA, -LEU | PLAS454 | Saccharomyces cerevisiae | Alk12 |
| Alk12 | | | CEN.PK2; ΔLEU2; ΔURA3; | overexpression |
| | | | Erg20K197E::KanMx; ALD6; | |
| | | | ASC1L641P; NPGA; MAF1; | |
| | | | PGK1p:Acc1; tHMGR1; IDI | |
| | | | CSAAE1; PC20; PT254; OXC155 | |
| HB1775- | URA, -LEU | PLAS455 | Saccharomyces cerevisiae | Alk13 |
| Alk13 | | | CEN.PK2; ΔLEU2; ΔURA3; | overexpression |
| | | | Erg20K197E::KanMx; ALD6; | |
| | | | ASC1L641P; NPGA; MAF1; | |
| | | | PGK1p:Acc1; tHMGR1; IDI | |
| | | | CSAAE1; PC20; PT254; OXC155 | |
| HB1775- | URA, -LEU | PLAS456 | Saccharomyces cerevisiae | Alk14 |
| Alk14 | | | CEN.PK2; ΔLEU2; ΔURA3; | overexpression |
| | | | Erg20K197E::KanMx; ALD6; | |
| | | | ASC1L641P; NPGA; MAF1; | |
| | | | PGK1p:Acc1; tHMGR1; IDI | |
| | | | CSAAE1; PC20; PT254; OXC155 | |
| HB1775- | URA, -LEU | PLAS457 | Saccharomyces cerevisiae | Alk15 |
| Alk15 | | | CEN.PK2; ΔLEU2; ΔURA3; | overexpression |
| | | | Erg20K197E::KanMx; ALD6; | |
| | | | ASC1L641P; NPGA; MAF1; | |
| | | | PGK1p:Acc1; tHMGR1; IDI | |
| | | | CSAAE1; PC20; PT254; OXC155 | |
| HB1775- | URA, -LEU | PLAS458 | Saccharomyces cerevisiae | Alk16 |
| Alk16 | | | CEN.PK2; ΔLEU2; ΔURA3; | overexpression |
| | | | Erg20K197E::KanMx; ALD6; | |
| | | | ASC1L641P; NPGA; MAF1; | |
| | | | PGK1p:Acc1; tHMGR1; IDI | |
| | | | CSAAE1; PC20; PT254; OXC155 | |
| HB1775- | URA, -LEU | PLAS459 | Saccharomyces cerevisiae | Alk17 |
| Alk17 | | | CEN.PK2; ΔLEU2; ΔURA3; | overexpression |
| | | | Erg20K197E::KanMx; ALD6; | |
| | | | ASC1L641P; NPGA; MAF1; | |
| | | | PGK1p:Acc1; tHMGR1; IDI | |
| | | | CSAAE1; PC20; PT254; OXC155 | |
| HB1775- | URA, -LEU | PLAS460 | Saccharomyces cerevisiae | Alk18 |
| Alk18 | | | CEN.PK2; ΔLEU2; ΔURA3; | overexpression |
| | | | Erg20K197E::KanMx; ALD6; | |
| | | | ASC1L641P; NPGA; MAF1; | |
| | | | PGK1p:Acc1; tHMGR1; IDI | |
| | | | CSAAE1; PC20; PT254; OXC155 | |
| HB1775- | URA, -LEU | PLAS461 | Saccharomyces cerevisiae | Alk19 |
| Alk19 | | | CEN.PK2; ΔLEU2; ΔURA3; | overexpression |
| | | | Erg20K197E::KanMx; ALD6; | |
| | | | ASC1L641P; NPGA; MAF1; | |
| | | | PGK1p:Acc1; tHMGR1; IDI | |
| | | | CSAAE1; PC20; PT254; OXC155 | |

[0393] Table 33 shows genes and proteins used in these Examples. Note that sequences for PKS13-76 are provided above.

TABLE 33
Genes And Proteins Used

| | | | Length of | Position of coding |
|---|---|---|---|---|
| SEQ ID NO: | Description | DNA/Protein | sequence | sequence |
| SEQ ID NO. 271 | CsAAE1 | Gene | 3858 | 856-3021 |
| SEQ ID NO. 272 | PC20 | Gene | 2051 | 842-1150 |
| SEQ ID NO. 273 | OXC155 | Gene | 4684 | 1505-3355 |
| SEQ ID NO. 274 | PDH | Gene | 7114 | Ald6: 1444-2949 |
| | | | | ACS: 3888-5843 |
| SEQ ID NO. 275 | MAF1 | Gene | 3256 | 36-2123 |
| SEQ ID NO. 276 | ERG20K197E | Gene | 4254 | 2842-3900 |
| SEQ ID NO. 277 | tHMGR1-IDI | Gene | 4843 | tHMGR1: 885-2393 |
| | | | | IDI1: 3209-4075 |
| SEQ ID NO. 278 | NPGA | Gene | 3564 | 1170-2201 |
| SEQ ID NO. 279 | PT254 | Gene | 2395 | 728-1699 |
| SEQ ID NO. 280 | PT72 | Gene | 2425 | 728-1729 |
| SEQ ID NO. 281 | PT104 | Gene | 2479 | 728-1783 |
| SEQ ID NO. 282 | PT273 | Gene | 2413 | 728-1717 |
| SEQ ID NO. 283 | RFP | Protein | 243 | all |
| SEQ ID NO. 284 | Alk1 | Protein | 721 | all |
| SEQ ID NO. 285 | Alk2 | Protein | 721 | all |
| SEQ ID NO. 286 | Alk3 | Protein | 537 | all |
| SEQ ID NO. 287 | Alk4 | Protein | 720 | all |
| SEQ ID NO. 288 | Alk5 | Protein | 640 | all |
| SEQ ID NO. 289 | Alk6 | Protein | 726 | all |
| SEQ ID NO. 290 | Alk7 | Protein | 722 | all |
| SEQ ID NO. 291 | Alk8 | Protein | 722 | all |
| SEQ ID NO. 292 | Alk9 | Protein | 744 | all |
| SEQ ID NO. 293 | Alk10 | Protein | 415 | all |
| SEQ ID NO. 294 | Alk11 | Protein | 721 | all |
| SEQ ID NO. 295 | Alk12 | Protein | 727 | all |
| SEQ ID NO. 296 | Alk13 | Protein | 729 | all |
| SEQ ID NO. 297 | Alk14 | Protein | 731 | all |
| SEQ ID NO. 298 | Alk15 | Protein | 686 | all |
| SEQ ID NO. 299 | Alk16 | Protein | 727 | all |
| SEQ ID NO. 300 | Alk17 | Protein | 732 | all |
| SEQ ID NO. 301 | Alk18 | Protein | 689 | all |
| SEQ ID NO. 302 | Alk19 | Protein | 544 | all |
| SEQ ID NO. 303 | Alk20 | Protein | 546 | all |
| SEQ ID NO. 304 | Alk21 | Protein | 577 | all |
| SEQ ID NO. 305 | Alk22 | Protein | 586 | all |
| SEQ ID NO. 306 | Alk23 | Protein | 572 | all |
| SEQ ID NO. 307 | Alk24 | Protein | 577 | all |
| SEQ ID NO. 308 | Alk25 | Protein | 577 | all |
| SEQ ID NO. 309 | Alk26 | Protein | 446 | all |
| SEQ ID NO. 310 | Alk27 | Protein | 446 | all |
| SEQ ID NO. 311 | Alk28 | Protein | 448 | all |
| SEQ ID NO. 312 | Alk29 | Protein | 447 | all |
| SEQ ID NO. 313 | Alk30 | Protein | 627 | all |
| SEQ ID NO. 314 | PKS80 | Protein | 345 | all |
| SEQ ID NO. 315 | PKS81 | Protein | 427 | all |
| SEQ ID NO. 316 | PKS82 | Protein | 330 | all |
| SEQ ID NO. 317 | PKS83 | Protein | 363 | all |
| SEQ ID NO. 318 | PKS84 | Protein | 450 | all |
| SEQ ID NO. 319 | PKS85 | Protein | 356 | all |
| SEQ ID NO. 320 | PKS86 | Protein | 367 | all |
| SEQ ID NO. 321 | PKS87 | Protein | 392 | all |
| SEQ ID NO. 322 | PKS88 | Protein | 345 | all |
| SEQ ID NO. 323 | PKS89 | Protein | 392 | all |
| SEQ ID NO. 324 | PKS90 | Protein | 408 | all |
| SEQ ID NO. 325 | PKS91 | Protein | 392 | all |
| SEQ ID NO. 326 | PKS92 | Protein | 343 | all |
| SEQ ID NO. 327 | PKS93 | Protein | 392 | all |
| SEQ ID NO. 328 | PKS94 | Protein | 392 | all |
| SEQ ID NO. 329 | PKS95 | Protein | 329 | all |
| SEQ ID NO. 330 | PKS96 | Protein | 372 | all |
| SEQ ID NO. 331 | PKS97 | Protein | 365 | all |
| SEQ ID NO. 332 | PKS98 | Protein | 392 | all |
| SEQ ID NO. 333 | PKS99 | Protein | 366 | all |
| SEQ ID NO. 334 | PKS100 | Protein | 398 | all |
| SEQ ID NO. 335 | PKS101 | Protein | 401 | all |
| SEQ ID NO. 336 | PKS102 | Protein | 379 | all |
| SEQ ID NO. 337 | PKS103 | Protein | 395 | all |
| SEQ ID NO. 338 | PKS104 | Protein | 390 | all |
| SEQ ID NO. 339 | PKS105 | Protein | 376 | all |
| SEQ ID NO. 340 | PKS106 | Protein | 437 | all |
| SEQ ID NO. 341 | PKS107 | Protein | 377 | all |
| SEQ ID NO. 342 | PKS108 | Protein | 419 | all |
| SEQ ID NO. 343 | PKS109 | Protein | 392 | all |
| SEQ ID NO. 344 | PLAS443 | DNA | 7948 | 3019-5181 |
| SEQ ID NO. 345 | PLAS444 | DNA | 7948 | 3019-5181 |
| SEQ ID NO. 346 | PLAS445 | DNA | 7396 | 3019-4629 |
| SEQ ID NO. 347 | PLAS446 | DNA | 7945 | 3019-5178 |
| SEQ ID NO. 348 | PLAS447 | DNA | 7705 | 3019-4938 |
| SEQ ID NO. 349 | PLAS448 | DNA | 7963 | 3019-5196 |
| SEQ ID NO. 350 | PLAS449 | DNA | 7951 | 3019-5184 |
| SEQ ID NO. 351 | PLAS450 | DNA | 7951 | 3019-5184 |
| SEQ ID NO. 352 | PLAS451 | DNA | 8017 | 3019-5250 |
| SEQ ID NO. 353 | PLAS452 | DNA | 7030 | 3019-4263 |
| SEQ ID NO. 354 | PLAS453 | DNA | 7948 | 3019-5181 |
| SEQ ID NO. 355 | PLAS454 | DNA | 7966 | 3019-5199 |
| SEQ ID NO. 356 | PLAS455 | DNA | 7972 | 3019-5205 |
| SEQ ID NO. 357 | PLAS456 | DNA | 7978 | 3019-5211 |
| SEQ ID NO. 358 | PLAS457 | DNA | 7843 | 3019-5076 |
| SEQ ID NO. 359 | PLAS458 | DNA | 7966 | 3019-5199 |
| SEQ ID NO. 360 | PLAS459 | DNA | 7981 | 3019-5214 |
| SEQ ID NO. 361 | PLAS460 | DNA | 7981 | 3019-5085 |
| SEQ ID NO. 362 | PLAS461 | DNA | 7417 | 3019-4650 |
| SEQ ID NO. 363 | PLAS462 | DNA | 7429 | 3019-4662 |
| SEQ ID NO. 364 | PLAS463 | DNA | 7522 | 3019-4755 |
| SEQ ID NO. 365 | PLAS464 | DNA | 7549 | 3019-4782 |
| SEQ ID NO. 366 | PLAS465 | DNA | 7507 | 3019-4740 |
| SEQ ID NO. 367 | PLAS466 | DNA | 7522 | 3019-4755 |
| SEQ ID NO. 368 | PLAS467 | DNA | 7522 | 3019-4755 |
| SEQ ID NO. 369 | PLAS468 | DNA | 7129 | 3019-4362 |
| SEQ ID NO. 370 | PLAS469 | DNA | 7126 | 3019-4359 |
| SEQ ID NO. 371 | PLAS470 | DNA | 7135 | 3019-4368 |
| SEQ ID NO. 372 | PLAS471 | DNA | 7132 | 3019-4365 |
| SEQ ID NO. 373 | PLAS472 | DNA | 7669 | 3019-4902 |
| SEQ ID NO. 374 | PLAS473 | DNA | 6823 | 3019-4056 |
| SEQ ID NO. 375 | PLAS474 | DNA | 7069 | 3019-4302 |
| SEQ ID NO. 376 | PLAS475 | DNA | 6778 | 3019-4011 |
| SEQ ID NO. 377 | PLAS476 | DNA | 6877 | 3019-4110 |
| SEQ ID NO. 378 | PLAS477 | DNA | 7138 | 3019-4371 |
| SEQ ID NO. 379 | PLAS478 | DNA | 6856 | 3019-4089 |
| SEQ ID NO. 380 | PLAS479 | DNA | 6889 | 3019-4122 |
| SEQ ID NO. 381 | PLAS480 | DNA | 6964 | 3019-4197 |
| SEQ ID NO. 382 | PLAS481 | DNA | 6823 | 3019-4056 |
| SEQ ID NO. 383 | PLAS482 | DNA | 6964 | 3019-4197 |
| SEQ ID NO. 384 | PLAS483 | DNA | 7012 | 3019-4245 |
| SEQ ID NO. 385 | PLAS484 | DNA | 6964 | 3019-4197 |
| SEQ ID NO. 386 | PLAS485 | DNA | 6817 | 3019-4050 |
| SEQ ID NO. 387 | PLAS486 | DNA | 6964 | 3019-4197 |
| SEQ ID NO. 388 | PLAS487 | DNA | 6964 | 3019-4197 |
| SEQ ID NO. 389 | PLAS488 | DNA | 6775 | 3019-4008 |
| SEQ ID NO. 390 | PLAS489 | DNA | 6904 | 3019-4137 |
| SEQ ID NO. 391 | PLAS490 | DNA | 6883 | 3019-4116 |
| SEQ ID NO. 392 | PLAS491 | DNA | 6964 | 3019-4197 |
| SEQ ID NO. 393 | PLAS492 | DNA | 6886 | 3019-4119 |
| SEQ ID NO. 394 | PLAS493 | DNA | 6982 | 3019-4215 |
| SEQ ID NO. 395 | PLAS494 | DNA | 6991 | 3019-4224 |
| SEQ ID NO. 396 | PLAS495 | DNA | 6925 | 3019-4158 |
| SEQ ID NO. 397 | PLAS496 | DNA | 6973 | 3019-4206 |
| SEQ ID NO. 398 | PLAS497 | DNA | 6922 | 3019-4155 |
| SEQ ID NO. 399 | PLAS498 | DNA | 6916 | 3019-4149 |
| SEQ ID NO. 400 | PLAS499 | DNA | 7099 | 3019-4332 |
| SEQ ID NO. 401 | PLAS500 | DNA | 6919 | 3019-4152 |
| SEQ ID NO. 402 | PLAS501 | DNA | 7045 | 3019-4278 |
| SEQ ID NO. 403 | PLAS502 | DNA | 6964 | 3019-4197 |
| SEQ ID NO. 404 | PLAS400 | DNA | 6484 | 3019-3717 |
| SEQ ID NO. 405 | CSAAE1 | Protein | 721 | all |
| SEQ ID NO. 406 | PC20 | Protein | 102 | all |
| SEQ ID NO. 407 | PT72 | Protein | 333 | all |
| SEQ ID NO. 408 | PT104 | Protein | 351 | all |
| SEQ ID NO. 409 | PT254 | Protein | 323 | all |
| SEQ ID NO. 410 | PT296 | Protein | 329 | all |
| SEQ ID NO. 411 | OXC53 | Protein | 616 | all |

[0394] Genetic Manipulations:

[0395] HB144 was used as a base strain to develop all other strains in this experiment. All DNA was transformed into strains using the Gietz et al transformation protocol (Saeki et al., 2018). Plas 36 was used for the CRISPR-based genetic modifications described herein (Geitz 2014).

[0396] The genome of HB42 was iteratively targeted by gRNA's and Cas9 expressed from PLAS36 to make the following genomic modifications in the order of Table 34 below.

TABLE 34
Genomic Modifications

| Order | Genomic Region | Modification |
|---|---|---|
| 1 | USER site XI-2 | CSAAE1 |
| | integration | |
| 2 | Flagfeldt Site 16 | PC20 |
| | integration | |
| 3 | Flagfeldt Site 20 | PT254 |
| | integration | |
| 3 | X-4 site integration | PT72 |
| 3 | X-4 site integration | PT104 |
| 3 | X-4 site integration | PT273 |
| 4 | Apel-3 site integration | OXC155 |

[0397] Experimental Conditions. 3 single colony replicates of strains were tested in this study. Following a 48 hour preculture, all strains were grown in 1 ml media in 96-well deepwell plates. The deepwell plates were incubated at 30° C. and shaken at 950 rpm for 96 hrs. Metabolite extraction was performed by adding 300 μl of 100% acetonitrile to 100 μl of culture in a new 96-well deepwell plate. The solutions were then centrifuged at 3750 rpm for 5 min. 200 μl of the soluble layer was removed and stored in a 96-well v-bottom microtiter plate. Samples were stored at −20° C. until analysis. Samples were quantified using HPLC-MS analysis.

[0398] Quantification Protocols

[0399] Olivetol/Olivetolic Acid

[0400] The quantification of olivetol, olivetolic acid was performed using HPLC-MS on a Acquity UPLC-TQD MS. The chromatography and MS conditions are described below.

[0401] Column: Waters Acquity UPLC C18 column 1×50 mm, 1.8 um. Column temperature: 45. Flow rate: 0.35 mL/min. Eluent A: H2O 0.1% Formic Acid. Eluent B: ACN 0.1% Formic Acid.

TABLE 35
Gradient

| Time (min) | % B | Flow rate (ml/min) |
|---|---|---|
| 0 | 80 | 0.35 |
| 0.55 | 10 | 0.35 |
| 0.56 | 80 | 0.35 |
| 1.00 | 80 | 0.35 |

[0402] ESI-MS conditions: Capillary: 4 kV. Source temperature: 150° C. Desolvation gas temperature: 400° C. Drying gas flow (nitrogen): 500 L/hr. Collision gas flow (argon): 0.10 mL/min.

[0403] MRM Transitions: Olivetol (positive ionisation): m/z 181.1→m/z 71. Olivetolic acid (negative ionisation): m/z 223→179.

[0404] Divarin, divarinic acid, CBGa, THCa. The quantification of divarin, divarinic acid, CBGVa and THCVa was performed using HPLC-MS on a Acquity UPLC-TQD MS. The chromatography and MS conditions are described below.

[0405] LC conditions: Column: Waters Acquity UPLC C18 column 1×50 mm, 1.8 um. Column temperature: 45. Flow rate: 0.35 mL/min. Eluent A: H2O 0.1% Formic Acid. Eluent B: ACN 0.1% Formic Acid.

TABLE 36
Gradient

| Time (min) | % B | Flow rate (ml/min) |
|---|---|---|
| 0 | 90 | 0.35 |
| 1.20 | 10 | 0.35 |
| 1.21 | 90 | 0.35 |
| 2.00 | 90 | 0.35 |

[0406] ESI-MS conditions: Capillary: 4 kV. Source temperature: 150° C. Desolvation gas temperature: 400° C. Drying gas flow (nitrogen): 500 L/hr. Collision gas flow (argon): 0.10 mL/min.

[0407] MRM Transitions: Divarin (positive ionisation): m/z 153.0→m/z 153.0. Divarinic acid (negative ionisation): m/z 195.1→m/z 151.0. CBGVa (negative ionisation): m/z 331.2→313.2. THCVa (negative ionisation): m/z 329.2→m/z 285.2. CBGa (negative ionisation): m/z 359.2→341.2. THCa (negative ionisation): m/z 357.2→313.2.

[0408] c7-alkylresorcylic acid, c5-alkynyl cannabigerolic acid, c5-alkenyl cannabigerolic acid. The quantification for C7-alkylresorcylic acid, cannabigryolic acid and cannabigenerolic acid utilized an Agilent 6560 ion mobility-QTOF. Chromatography and MS conditions are described below. Exact masses of observed products are provided below.

[0409] LC conditions: Column: Acquity UPLC BEH 018 1.7 micron 2.1×5 mm. Column temperature: 45° C. Flow rate: 0.3 ml/min. Eluent A: Water 100%. Eluent B: Acetonitrile 100%.

TABLE 37
Gradient

| Time (min) | % B | Flow rate (ml/min) |
|---|---|---|
| 0.00 | 30 | 0.300 |
| 3.50 | 95 | 0.300 |
| 3.60 | 95 | 0.450 |
| 4.60 | 95 | 0.450 |
| 4.70 | 30 | 0.450 |
| 7.00 | 30 | 0.300 |

[0410] ESI-MS conditions: Capillary: 3.5 kV. Source temperature: 150° C. Desolvation gas temperature: 300° C. Drying gas flow (nitrogen): 600 L/hr. Sheath gas flow (nitrogen): 660 L/h r.

TABLE 38
Monoisotopic Masses Of Analyzed Minor Cannabinoids
And Their Polyketide Precursors

| | M/z of | | M/z of | |
|---|---|---|---|---|
| | polyketide | M/z of prenylated | polyketide | M/z of prenylated |
| Fed acid | alcohol | polyketide alcohol | acid | polyketide acid |
| Octanoic acid 0.3 mM | 208.1463 | 388.2614 | 252.1362 | 388.2614 |
| hexynoic acid 1 mM | 176.0837 | 356.1988 | 220.0735 | 356.1988 |
| hexenoic acid 1 mM | 178.0994 | 358.2144 | 222.0892 | 358.2144 |

### Example 6

[0411] Production of Olivetol and Olivetolic Acid in S. cerevisiae by Hexanoic Acid Feeding

[0412] This Example Involves In vivo production of olivetol and olivetolic acid in S. cerevisiae by hexanoic acid feeding. Here we show that co-expressing our type III PKS library with CSAAE1 and PC20 and feeding hexanoic acid results in the production of olivetol and olivetolic acid. These data illustrate that these enzymes also function in S. cerevisiae and can be used to produce olivetolic acid as well as olivetol.

[0413] Strain Growth and Media. Strains were grown in 500 ul pre-cultures for 48 hours in a 96 well plate. The preculture media consisted of yeast minimal media with a composition of 1.7 g/L YNB without ammonium sulfate+1.96 g/L URA dropout amino acid supplements+0.375 g/L monosodium glutamate and 10 g/L glucose. After 48 hours 50 ul of culture was transferred to a fresh 96 well plate containing 450 ul of culture media culture consisting of 1.7 g/L YNB without ammonium sulfate+1.96 g/L URA dropout amino acid supplements+1.5 g/L monosodium glutamate, 20 g/L raffinose and 20 g/L galactose+1.5 mM hexanoic acid. Strains were grown for an additional 96 hours and then extracted in acetonitrile.

[0414] Results

[0415] HB1521 was transformed with plasmids expressing either PKS(1-76) or an RFP negative were grown in the presence of 1 mM hexanoic acid. HB1521 has genomic copies CSAAE1 and PC20 from C. sativa and should produce olivetol and olivetolic acid in the presence of an appropriate polyketide synthase. Olivetol and olivetolic acid produced by these strains is shown in FIG. 23, the values for which are provided in Table 39.

TABLE 39
Olivetol and olivetolic acid produced by strains in Example 6

| Strain Name | Olivetol (mg/L) | Olivetolic acid (mg/) |
|---|---|---|
| HB1521-PKS13 | 5.73 | 2.40 |
| HB1521-PKS14 | 5.46 | 2.29 |
| HB1521-PKS47 | 2.4 | 1.73 |
| HB1521-PKS49 | 21.06 | 8.93 |
| HB1521-PKS72 | 4.40 | 1.40 |
| HB1521-PKS73 | 36.53 | 13.33 |
| HB1521-PKS74 | 5.40 | 0.69 |
| HB1521-RFP | 0 | 0 |

### Example 7

[0416] In Vivo Production of THCVa

[0417] This Example involves in vivo production of THCVa using PKS73. This shows a unique route to THCVa using PKS73 in place of the C. sativa polyketide synthase. Feeding HB1775—a strain expressing CSAAE1, PC20, PT254, PKS73, and OXC155 with butyric acid results in THCVa production.

[0418] Strain Growth and Media. Strains were grown in 500 ul pre-cultures for 48 hours in a 96 well plate. The preculture media consisted of yeast minimal media with a composition of 1.7 g/L YNB without ammonium sulfate+1.96 g/L URA dropout amino acid supplements+0.375 g/L monosodium glutamate and 10 g/L glucose. After 48 hours 50 ul of culture was transferred to a fresh 96 well plate containing 450 ul of culture media culture consisting of 1.7 g/L YNB without ammonium sulfate+1.96 g/L URA dropout amino acid supplements+1.5 g/L monosodium glutamate, 20 g/L raffinose and 20 g/L galactose+5 mM butyric acid. Strains were grown for an additional 96 hours and then extracted in acetonitrile.

[0419] Results

[0420] HB1775-RFP and HB144-RFP were grown in the presence in of 5 mM butyric acid. HB1775 has the genomic copies of CSAAE1, PC20, PT254 and OXC155 and PKS73, which should function as a complete pathway to THCVa. Divarin, divarinic acid, CBGVa and THCVa titres are shown in FIG. 24 and Table 40.

[0421] FIG. 24 shows divarin, divarinic acid, CBGVa and THCVa produced by strains in Example 7.

TABLE 40
Divarin, divarinic acid, CBGVa and THCVa
produced bv strains in Example 7

| | Divarin | Divarinic acid | CBGVa | THCVa |
|---|---|---|---|---|
| Strain name | (mg/L) | (mg/L) | (mg/L) | (mg/L) |
| HB1775-RFP | 5.64 | 5.65 | 0 | 2.37 |
| HB144-RFP | 0 | 0 | 0 | 0 |

### Example 8

[0422] In Vivo Production of C7-Resorcylic Acid

[0423] In this Example, in vivo production of C7-resorcylic acid. Here we show that co-expressing our type III PKS library with CSAAE1 and PC20 and feeding octanoic acid results in the production of C7-alkylresorcylic acid. These data emphasize that a wide variety of molecules can be produced.

[0424] Strain Growth and Media. Strains were grown in 500 ul pre-cultures for 48 hours in a 96 well plate. The preculture media consisted of yeast minimal media with a composition of 1.7 g/L YNB without ammonium sulfate+1.96 g/L URA dropout amino acid supplements+0.375 g/L monosodium glutamate and 10 g/L glucose. After 48 hours 50 ul of culture was transferred to a fresh 96 well plate containing 450 ul of culture media culture consisting of 1.7 g/L YNB without ammonium sulfate+1.96 g/L URA dropout amino acid supplements+1.5 g/L monosodium glutamate, 20 g/L raffinose and 20 g/L galactose+0.3 mM octanoic acid. Strains were grown for an additional 96 hours and then extracted in acetonitrile.

[0425] Results

[0426] HB1629, HB1630, HB1631, HB1632 were transformed with plasmids expressing either PKS(1-76) or an RFP negative were grown in the presence of 0.3 mM octanoic acid. C7-alkylresorcyclic acid produced by these strains is shown in FIG. 25 and Table 41. FIG. 25 shows the octavic acid produced by strains in Example 8.

TABLE 41
Octavic acid produced by strains in Example 8

| Sample | Octavic acid average peak area |
|---|---|
| HB1629 PKS13 | 14032.26184 |
| HB1629 PKS14 | 10585.66787 |
| HB1629 PKS45 | 12065.22438 |
| HB1629 PKS47 | 4928.055321 |
| HB1629 PKS49 | 14412.86157 |
| HB1629 PKS65 | 16777.29025 |
| HB1629 PKS73 | 22888.1585 |
| HB1630 PKS45 | 17342.71935 |
| HB1631 PKS14 | 17661.76765 |
| HB1631 PKS45 | 10364.85643 |
| HB1631 PKS65 | 13347.65607 |
| HB1632 PKS45 | 17692.8092 |
| HB1632 PKS49 | 14371.08001 |
| HB1632 PKS65 | 17148.85877 |
| HB1632 PKS73 | 19542.02565 |
| HB1629-ve | 0 |
| HB1630-ve | 0 |
| HB1631-ve | 0 |
| HB1632-ve | 0 |

### Example 9

[0427] In Vivo Production of C5-Alkynyl Cannabigerolic Acid

[0428] In this Example, in vivo production of C5-alkynyl cannabigerolic acid. Here we show that co-expressing our type III PKS library with CSAAE1, PC20, PT72/254/273 and feeding hexynoic acid results in the production of C5-alkynyl cannabigerolic acid. These data illustrate that a wide variety of molecules can be produced.

[0429] Strain Growth and Media. Strains were grown in 500 ul pre-cultures for 48 hours in a 96 well plate. The preculture media consisted of yeast minimal media with a composition of 1.7 g/L YNB without ammonium sulfate+1.96 g/L URA dropout amino acid supplements+0.375 g/L monosodium glutamate and 10 g/L glucose. After 48 hours 50 ul of culture was transferred to a fresh 96 well plate containing 450 ul of culture media culture consisting of 1.7 g/L YNB without ammonium sulfate+1.96 g/L URA dropout amino acid supplements+1.5 g/L monosodium glutamate, 20 g/L raffinose and 20 g/L galactose+1 mM hexynoic acid. Strains were grown for an additional 96 hours and then extracted in acetonitrile.

[0430] Results

[0431] HB1629, HB1630, HB1631, HB1632 were transformed with plasmids expressing either PKS(1-76) or an RFP negative were grown in the presence of 1 mM hexynoic acid. C-alkynyl cannabigerolic acid produced by these strains is shown in FIG. 26 and Table 42.

[0432] FIG. 26 shows C5-alkynyl cannabigerolic acid peak area produced by strains in Example 9.

TABLE 4442
C5-alkynyl cannabigerolic peak area
produced by strains in Example 9

| Sample | C5-alkynyl cannabigerolic acid (AU) |
|---|---|
| HB1630 PKS13 | 17816.59 |
| HB1630 PKS45 | 35389.59 |
| HB1630 PKS47 | 29788.67 |
| HB1630 PKS49 | 27621.36 |
| HB1630 PKS65 | 32076.54 |
| HB1630 PKS72 | 101523.4 |
| HB1631 PKS14 | 70359.28 |
| HB1631 PKS45 | 17829.34 |
| HB1630-ve | 0 |
| HB1631-ve | 0 |

### Example 10

[0433] In Vivo Production of C5-Alkenyl Cannabicierolic Acid

[0434] In this Example, in vivo production of C5-alkenyl cannabigerolic acid. Here we show that co-expressing our type III PKS library with CSAAE1, PC20, PT72/254/273 and feeding hexenoic acid results in the production of C5-alkenyl cannabigerolic acid. These data serve to illustrate the wide variety of molecules that can be produced.

[0435] Strain Growth and Media. Strains were grown in 500 ul pre-cultures for 48 hours in a 96 well plate. The preculture media consisted of yeast minimal media with a composition of 1.7 g/L YNB without ammonium sulfate+1.96 g/L URA dropout amino acid supplements+0.375 g/L monosodium glutamate, 10 g/L glucose. After 48 hours 50 ul of culture was transferred to a fresh 96 well plate containing 450 ul of culture media culture consisting of 1.7 g/L YNB without ammonium sulfate+1.96 g/L URA dropout amino acid supplements+1.5 g/L monosodium glutamate, 20 g/L raffinose and 20 g/L galactose+1 mM hexenoic acid. Strains were grown for an additional 96 hours and then extracted in acetonitrile.

[0436] Results

[0437] HB1629, HB1630, HB1631, HB1632 was transformed with plasmids expressing either PKS(1-76) or an RFP negative were grown in the presence of 1 mM hexenoic acid. 05-alkenyl cannabigerolic acid produced by these strains is shown in FIG. 27 and Table 43.

[0438] FIG. 27 shows C5-alkenyl cannabigerolic acid made by strains in Example 10.

TABLE 43
C5-alkenyl cannabigerolic acid produced by strains in Example 10

| | C5- alkenyl cannabigerolic |
|---|---|
| Sample | acid peak area (AU) |
| HB1629 PKS13 | 17836.53 |
| HB1629 PKS14 | 12757.36 |
| HB1629 PKS45 | 12904.15 |
| HB1629 PKS47 | 5061.72 |
| HB1629 PKS49 | 13877.61 |
| HB1629 PKS65 | 26850.13 |
| HB1629 PKS72 | 16371.23 |
| HB1629 PKS73 | 21520.13 |
| HB1630 PKS13 | 12289.22 |
| HB1630 PKS45 | 22231.78 |
| HB1630 PKS47 | 15682.69 |
| HB1630 PKS49 | 17322.95 |
| HB1630 PKS65 | 21954.95 |
| HB1630 PKS72 | 22550.53 |
| HB1630 PKS73 | 11677.2 |
| HB1631 PKS13 | 15231.79 |
| HB1631 PKS14 | 26376.23 |
| HB1631 PKS45 | 13862.53 |
| HB1631 PKS47 | 25769.12 |
| HB1631 PKS49 | 16337.47 |
| HB1631 PKS65 | 16384.54 |
| HB1631 PKS72 | 15954.29 |
| HB1631 PKS73 | 20696.74 |
| HB1632 PKS13 | 21085.44 |
| HB1632 PKS14 | 15475.68 |
| HB1632 PKS45 | 27779.46 |
| HB1632 PKS47 | 21877.01 |
| HB1632 PKS49 | 26224.24 |
| HB1632 PKS65 | 25713.67 |
| HB1632 PKS72 | 26775.86 |
| HB1632 PKS73 | 35372.72 |
| HB1629-ve | 0 |
| HB1630-ve | 0 |
| HB1631-ve | 0 |
| HB1632-ve | 0 |

### Example 11

[0439] Overexpression of Additional Polyketide and Acyl-CoA Synthases in HB1775.

[0440] In this Example, overexpression of polyketide and acyl-CoA synthases in HB1775. In this example we transformed HB1775 with either an additional PKS (PKS80-109) or acyl-CoA synthase (Alk1-Alk30). HB1775 contains integrated copies of CSAAE1, PC20, PKS73, PT254, OXC155 and produces THCVa when fed with butyric acid. It is illustrated that overexpression of many of these enzymes in HB1775 results in an increase in THCVa titres vs the HB1775-RFP control.

[0441] Strain Growth and Media. Strains were grown in 500 ul pre-cultures for 48 hours in a 96 well plate. The preculture media consisted of yeast minimal media with a composition of 1.7 g/L YNB without ammonium sulfate+1.96 g/L URA dropout amino acid supplements+0.375 g/L monosodium glutamate and g/L glucose. After 48 hours 50 ul of culture was transferred to a fresh 96 well plate containing 450 ul of culture media culture consisting of 1.7 g/L YNB without ammonium sulfate+1.96 g/L URA dropout amino acid supplements+1.5 g/L monosodium glutamate, 20 g/L raffinose and 20 g/L galactose+5 mM butyric acid. Strains were grown for an additional 96 hours and then extracted in acetonitrile.

[0442] Results

[0443] HB1775 was transformed with either a PKS(PKS8Y-109), acyl-CoA synthase(Alk1-Alk30) or RFP. The resulting strains were grown in the presence of 5 mM butyric acid. Overexpression of many of these enzymes resulted in improved CBGVa and THCVa titres vs the control. Divarin, divarininic acid, CBGVa and THCVa titres for strains in this are shown below in Table 44.

[0444] Overexpressions for Alk24, Alk25, PKS84, PKS95, PKS13 PKS8, PKS88, PKS96 PKS104, PKS81, PKS89, PKS97, PKS105 are not listed in this data set.

TABLE 44
Divarin, divarininic acid, CBGVa and THCVa titres from strains in Example 11

| Gene | | Divarinic Acid | CBGVa | THCVa | More THCVa |
|---|---|---|---|---|---|
| Overexpression | Divarin(mg/L) | (mg/L) | (mg/L) | (mg/L) | than control? |
| HB1775-RFP | 1.41 | 1.413333 | 0 | 0.593333 | NA |
| HB1775-Alk27 | 2.796667 | 3.526667 | 0 | 1.45 | Yes |
| HB1775-PKS92 | 1.473333 | 1.656667 | 0 | 0.786667 | Yes |
| HB1775-PKS100 | 1.89 | 1.766667 | 0 | 0.776667 | Yes |
| HB1775-PKS108 | 1.276667 | 1.396667 | 0.206667 | 0.63 | Yes |
| HB1775-Alk20 | 1.843333 | 2.586667 | 0 | 1.096667 | Yes |
| HB1775-Alk28 | 2.236667 | 2.9 | 0 | 1.07 | Yes |
| HB1775-PKS85 | 1.606667 | 1.726667 | 0.2 | 0.816667 | Yes |
| HB1775-PKS93 | 1.183333 | 1.106667 | 0 | 0.536667 | No |
| HB1775-PKS101 | 1.756667 | 1.613333 | 0 | 0.876667 | Yes |
| HB1775-PKS109 | 1.21 | 1.243333 | 0 | 0.7 | Yes |
| HB1775-Alk21 | 1.59 | 1.62 | 0 | 0.776667 | Yes |
| HB1775-Alk29 | 1.333333 | 1.443333 | 0 | 0.826667 | Yes |
| HB1775-PKS86 | 1.726667 | 1.873333 | 0 | 1.07 | Yes |
| HB1775-PKS94 | 1.4 | 1.34 | 0 | 0.813333 | Yes |
| HB1775-PKS102 | 1.353333 | 1.286667 | 0.1 | 0.763333 | Yes |
| HB1775-Alk22 | 1.423333 | 1.483333 | 0 | 0.813333 | Yes |
| HB1775-Alk30 | 1.533333 | 1.7 | 0 | 0.73 | Yes |
| HB1775-PKS87 | 1.163333 | 1.26 | 0 | 0.456667 | No |
| HB1775-Alk25 | 1.796667 | 1.863333 | 0 | 0.906667 | Yes |
| HB1775-PKS82 | 1.636667 | 1.623333 | 0 | 0.926667 | Yes |
| HB1775-PKS90 | 1.73 | 1.893333 | 0 | 1.03 | Yes |
| HB1775-PKS98 | 1.356667 | 1.36 | 0 | 0.776667 | Yes |
| HB1775-PKS106 | 1.75 | 1.7 | 0 | 0.97 | Yes |
| HB1775-Alk26 | 3.103333 | 3.636667 | 0 | 1.33 | Yes |
| HB1775-PKS83 | 1.48 | 1.636667 | 0 | 0.8 | Yes |
| HB1775-PKS91 | 1.34 | 1.196667 | 0.17 | 0.51 | No |
| HB1775-PKS99 | 1.576667 | 1.64 | 0 | 0.856667 | Yes |
| HB1775-PKS107 | 1.53 | 1.59 | 0 | 0.883333 | Yes |
| HB1775-PKS73 | 3.506667 | 3.523333 | 0 | 1.653333 | Yes |
| HB1775-Alk1 | 1.563333 | 1.54 | 0.1 | 0.766667 | Yes |
| HB1775-Alk2 | 1.866667 | 2.086667 | 1.143333 | 0.85 | Yes |
| HB1775-Alk3 | 1.886667 | 2.063333 | 0 | 1.09 | Yes |
| HB1775-Alk4 | 1.97 | 2.09 | 0.843333 | 0.873333 | Yes |
| HB1775-Alk5 | 1.636667 | 1.61 | 0 | 0.89 | Yes |
| HB1775-Alk6 | 2.096667 | 2.29 | 0.93 | 1.053333 | Yes |
| HB1775-Alk7 | 2.34 | 2.746667 | 0.725 | 1.12 | Yes |
| HB1775-Alk8 | 1.756667 | 1.776667 | 0.11 | 1.04 | Yes |
| HB1775-Alk9 | 0.933333 | 1.086667 | 0 | 0.376667 | No |
| HB1775-Alk10 | 0.77 | 0.766667 | 0 | 0.35 | No |
| HB1775-Alk11 | 0.72 | 0.75 | 0.145 | 0.233333 | No |
| HB1775-Alk12 | 0.7 | 0.693333 | 0.22 | 0.26 | No |
| HB1775-Alk13 | 0.693333 | 0.943333 | 0.1 | 0.213333 | No |
| HB1775-Alk14 | 1.096667 | 1.363333 | 0 | 0.513333 | No |
| HB1775-Alk15 | 0.726667 | 0.61 | 0 | 0.063333 | No |
| HB1775-Alk16 | 0.866667 | 0.923333 | 0.2 | 0.36 | No |
| HB1775-Alk17 | 0.963333 | 1.25 | 0.14 | 0.33 | No |
| HB1775-Alk18 | 1.14 | 1.433333 | 0 | 0.5 | No |
| HB1775-Alk19 | 1.01333333 | 1.32333333 | 0 | 0.47 | No |

[0445] Part 4

[0446] Dictyostelium discoideum Polyketide Synthase (DiPKS), Olivetolic Acid Cyclase (OAC), Prenyltransferases, and Mutants Thereof for Production of Phytocannabinoids

[0447] The present disclosure relates generally to methods of production of phytocannabinoids in a host cell involving Dictyostelium discoideum polyketide synthase (DiPKS), olivetolic acid cyclase (OAC), prenyltransferases, and/or mutants of these.

[0448] Overview

[0449] It is an object of the present disclosure to obviate or mitigate at least one disadvantage of previous approaches to producing phytocannabinoids in a host cell, and of previous approaches to producing phytocannabinoid analogues.

[0450] In a first aspect, herein provided is a method and cell line for producing polyketides in recombinants organisms. The method applies, and the cell line includes, a host cell transformed with a polyketide synthase CDS, an olivetolic acid cyclase CDS and a prenyltransferase CDS. The polyketide synthase and the olivetolic acid cyclase catalyze synthesis of olivetolic acid from malonyl CoA. The olivetolic acid cyclase may include Cannabis sativa OAC. The polyketide synthase may include Dictyostelium discoideum polyketide synthase with a G1516R substitution. The prenyltransferase catalyzes synthesis of cannabigerolic acid or a cannabigerolic acid analogue, and may include PT254 from C. sativa. The host cell may include a tetrahydrocannabinolic acid synthase CDS, and the corresponding tetrahydrocannabinolic acid synthase catalyzes synthesis of A9-tetrahydrocannabinolic acid from cannabigerolic acid. The host cell may include a yeast cell, a bacterial cell, a protest cell or a plant cell.

[0451] A method of producing phytocannabinoids or phytocannabinoid analogues is described, comprising: providing a host cell comprising a first polynucleotide coding for a polyketide synthase enzyme, a second polynucleotide coding for an olivetolic acid cyclase enzyme and a third polynucleotide coding for a prenyltransferase enzyme and propagating the host cell for providing a host cell culture. The polyketide synthase enzyme and the olivetolic acid cyclase enzyme are for producing at least one precursor chemical from malonyl-CoA, the at least one precursor chemical according to formula 4-I:

[chemical structure]

[0452] On formula 4-1, R1 is an alkyl group with a chain length of 1, 2, 3, 4, 5, 6, 7, 8, 16 or 18 carbons. The prenyltransferase enzyme is for prenylating the at least one precursor chemical with a prenyl group, providing at least one species of phytocannabinoid or phytocannabinoid analogue. The prenyl group is selected from the group consisting of dimethylallyl pyrophostphate, isopentenyl pyrophosphate, geranyl pyrophosphate, neryl pyrophosphate, farnesyl pyrophosphate and any isomer of the foregoing.

[0453] The at least one species of phytocannabinoid or phytocannabinoid analogue may have a structure according to formula 4-II:

[chemical structure]

[0454] On formula 4-II, R1 is an alkyl group with a chain length of 1, 2, 3, 4, 5, 6, 7, 8, 16 or 18 carbons, and n is an integer with a value of 1, 2 or 3. The method involves propagating the host cell for providing a host cell culture capable of producing phytocannabinoids or analogues thereof.

[0455] An expression vector is described, comprising a first polynucleotide coding for a polyketide synthase enzyme; a second polynucleotide coding for an olivetolic acid cyclase enzyme; and a third polynucleotide coding for a prenyltransferase enzyme.

[0456] Further, a host cell is described for producing phytocannabinoids or analogues thereof, wherein the cell comprises a first polynucleotide coding for a polyketide synthase enzyme; a second polynucleotide coding for an olivetolic acid cyclase enzyme; and a third polynucleotide coding for a prenyltransferase enzyme.

[0457] A method of transforming a host cell for production of phytocannabinoids or phytocannabinoid analogues is also described. The method comprises introducing a first polynucleotide coding for a polyketide synthase enzyme into the host cell line; introducing a second polynucleotide coding for an olivetolic acid cyclase enzyme into the host cell; and introducing a third polynucleotide coding for a prenyltransferase enzyme into the host cell.

### Detailed Description of Part 4

[0458] Generally, the present disclosure provides methods and yeast cell lines for producing phytocannabinoids that are naturally biosynthesized in the Cannabis sativa plant and phytocannabinoid analogues with differing side chain lengths. The phytocannabinoids and phytocannabinoid analogues are produced in transgenic yeast. The methods and cell lines provided herein include application of genes for enzymes absent from the C. sativa plant. Application of genes other than the complete set of genes in the C. sativa plant that code for enzymes in the biosynthetic pathway resulting in phytocannabinoids may provide one or more benefits including biosynthesis of phytocannabinoid analogues, biosynthesis of phytocannabinoids without input of hexanoic acid, which is toxic to Saccharomyces cerevisiae and other species of yeast, and improved yield.

[0459] In a further aspect, herein provided is a method of producing phytocannabinoids or phytocannabinoid analogues, the method comprising: providing a host cell comprising a first polynucleotide coding for a polyketide synthase enzyme, a second polynucleotide coding for an olivetolic acid cyclase enzyme and a third polynucleotide coding for a prenyltransferase enzyme and propagating the host cell for providing a host cell culture. The polyketide synthase enzyme and the olivetolic acid cyclase enzyme are for producing at least one precursor chemical from malonyl-CoA, the at least one precursor chemical according to formula 4-I:

[chemical structure]

[0460] On formula 4-I, R1 is an alkyl group with a chain length of 1, 2, 3, 4, 5, 6, 7, 8, 16 or 18 carbons. The prenyltransferase enzyme is for prenylating the at least one precursor chemical with a prenyl group, providing at least one species of phytocannabinoid or phytocannabinoid analogue. The prenyl group is selected from the group consisting of dimethylallyl pyrophostphate, isopentenyl pyrophosphate, geranyl pyrophosphate, neryl pyrophosphate, farnesyl pyrophosphate and any isomer of the foregoing.

[0461] The at least one species of phytocannabinoid or phytocannabinoid analogue may have a structure according to formula 4-II:

[chemical structure]

[0462] On formula 4-II, R1 is an alkyl group with a chain length of 1, 2, 3, 4, 5, 6, 7, 8, 16 or 18 carbons, and n is an integer with a value of 1, 2 or 3. The method involves propagating the host cell for providing a host cell culture capable of producing phytocannabinoids or analogues thereof.

[0463] In some embodiments, the polyketide synthase comprises a DiPKS^{G1516R} polyketide synthase enzyme, modified relative to DiPKS found from D. discoideum. In some embodiments, the first polynucleotide comprises a coding sequence for DiPKS^{G1516R} with a primary structure having between 80% and 100% amino acid residue sequence homology with a protein coded for by a reading frame defined by a coding sequence selected from the group consisting of bases 849 to 10292 of SEQ ID NO:427, bases 717 to 10160 of SEQ ID NO:428, bases 795 to 10238 of SEQ ID NO: 429, bases 794 to 10237 of SEQ ID NO:430, bases 1172 to 10615 of SEQ ID NO:431. In some embodiments, the first polynucleotide has between 80% and 100% base sequence homology with a reading frame defined by a coding sequence selected from the group consisting of bases 849 to 10292 of SEQ ID NO: 427, bases 717 to 10160 of SEQ ID NO: 428, bases 795 to 10238 of SEQ ID NO: 429, bases 794 to 10237 of SEQ ID NO:430, bases 1172 to 10615 of SEQ ID NO:431. In some embodiments, the host cell comprises a phosphopantetheinyl transferase polynucleotide coding for a phosphopantetheinyl transferase enzyme for increasing the activity of DiPKS^{G1516R}

[0464] In some embodiments, the phosphopantetheinyl transferase comprises NpgA phosphopantetheinyl transferase enzyme from A. nidulans. In some embodiments, the at least one precursor chemical comprises olivetolic acid, with a pentyl group at R1 and the at least one species of phytocannabinoid or phytocannabinoid analogue comprises a pentyl-phytocannabinoid. In some embodiments, the olivetolic acid cyclase enzyme comprises csOAC from C. sativa. In some embodiments, the second polynucleotide comprises a coding sequence for csOAC with a primary structure having between 80% and 100% amino acid residue sequence homology with a protein coded for by a reading frame defined by bases 842 to 1150 of SEQ ID NO: 415. In some embodiments, the second polynucleotide has between 80% and 100% base sequence homology with bases 842 to 1150 of SEQ ID NO: 415.

[0465] In some embodiments, the third polynucleotide codes for prenyltransferase enzyme PT254 from Cannabis sativa. In some embodiments, the third polynucleotide comprises a coding sequence for PT254 with a primary structure having between 80% and 100% amino acid residue sequence homology with a protein coded for by a reading frame defined by bases 1162 to 2133 of SEQ ID NO: 416. In some embodiments, the third polynucleotide has between 80% and 100% base sequence homology with bases 1162 to 2133 of SEQ ID NO:416.

[0466] In some embodiments, the third polynucleotide comprises a coding sequence for PT254^{R2S} with a primary structure having between 80% and 100% amino acid residue sequence homology with a protein coded for by a reading frame defined by bases 1162 to 2133 of SEQ ID NO: 417. In some embodiments, the third polynucleotide has between 80% and 100% base sequence homology with bases 1162 to 2133 of SEQ ID NO: 417.

[0467] In some embodiments, the method includes a downstream phytocannabinoid polynucleotide including a coding sequence for THCa synthase from C. sativa. In some embodiments, the downstream phytocannabinoid polynucleotide includes a coding sequence for THCa synthase with a primary structure having between 80% and 100% amino acid residue sequence homology with a protein coded for by a reading frame defined by bases 587 to 2140 of SEQ ID NO: 425.

[0468] In some embodiments, the downstream phytocannabinoid polynucleotide has between 80% and 100% base sequence homology with bases 587 to 2140 of SEQ ID NO: 425. In some embodiments, the host cell comprises a genetic modification to increase available geranylpyrophosphate. In some embodiments, the genetic modification comprises a partial inactivation of the farnesyl synthase functionality of the Erg20 enzyme.

[0469] In some embodiments, the host cell comprises an Erg20^{K197E} polynucleotide including a coding sequence for Erg20^{K197E}. In some embodiments, the host cell comprises a genetic modification to increase available malonyl-CoA. In some embodiments, the host cell comprises a yeast cell and the genetic modification comprises increased expression of Maf1. In some embodiments, the genetic modification comprises a modification for increasing cytosolic expression of an aldehyde dehydrogenase and an acetyl-CoA synthase.

[0470] In some embodiments, the host cell comprises a yeast cell and the genetic modification comprises a modification for expressing for Acs^{L641P} from S. enterica and Ald6 from S. cerevisiae. In some embodiments, the genetic modification comprises a modification for increasing malonyl-CoA synthase activity. In some embodiments, the host cell comprises a yeast cell and the genetic modification comprises a modification for expressing Acc1^{S659A; S1157A} from S. cerevisiae. In some embodiments, the host cell comprises a yeast cell comprising an Acc1 polynucleotide including the coding sequence for Acc1 from S. cerevisiae under regulation of a constitutive promoter. In some embodiments, the constitutive promoter comprises a PGK1 promoter from S. cerevisiae.

[0471] The host cell can be a bacterial cell, a fungal cell, a protist cell, or a plant cell, such as any of the exemplary cell types noted herein in Table 2. Exemplary host cell types include S. cerevisiae, E. coli, Yarrowia lipolytica, and Komagataella phaffii.

[0472] In some embodiments, the method includes extracting the at least one species of phytocannabinoid or phytocannabinoid analogue from the host cell culture.

[0473] In a further aspect, herein provided is a host cell for producing phytocannabinoids or phytocannabinoid analogues, the host cell comprising: a first polynucleotide coding for a polyketide synthase enzyme; a second polynucleotide coding for an olivetolic acid cyclase enzyme; and a third polynucleotide coding for a prenyltransferase enzyme.

[0474] In some embodiments, the host cell includes features of one or more of the host cell, the first polynucleotide, the second polynucleotide, the third nucleotide, the Erg20^{K197E} polynucleotide, the Acc1 polynucleotide, or the downstream phytocannabinoid polynucleotide as described in relation to the method of producing phytocannabinoids or phytocannabinoid analogues above.

[0475] In a further aspect, herein provided is a method of transforming a host cell for production of phytocannabinoids or phytocannabinoid analogues, the method comprising: introducing a first polynucleotide coding for a polyketide synthase enzyme into the host cell line; introducing a second polynucleotide coding for an olivetolic acid cyclase enzyme into the host cell; and introducing a third polynucleotide coding for a prenyltransferase enzyme into the host cell.

[0476] In some embodiments, the method includes application of a host cell including the features of one or more of the host cell, the first polynucleotide, the second polynucleotide, the third nucleotide, the Erg20^{K197E} polynucleotide, the Acc1 polynucleotide, or the downstream phytocannabinoid polynucleotide as described in relation to the method of producing phytocannabinoids or phytocannabinoid analogues above.

[0477] Many of the 120 phytocannabinoids found in Cannabis sativa may be synthesized in a host cell, and it may be desirable to improve production in host cells. Similarly, an approach that allows for production of phytocannabinoid analogues without the need for labour-intensive chemical synthesis may be desirable.

[0478] In C. sativa, a type 3 polyketide synthase called olivetolic acid synthase (“csOAS”) catalyzes synthesis of olivetolic acid from hexanoyl-CoA and malonyl-CoA in the presence of olivetolic acid cyclase (“csOAC”). Both csOAS and csOAC have been previously characterised as part of the C. sativa phytocannabinoid biosynthesis pathway (Gagne et al., 2012).

[0479] In C. sativa, a prenyltransferase enzyme catalyzes synthesis of cannabigerolic acid (“CBGa”) from olivetolic acid and geranyl pyrophosphate (“GPP”). One of the prenyltransferase enzymes identified in C. sativa is called d76csPT4 “PT254”. PT254 is a membrane bound enzyme with demonstrated high turnover for converting olivetolic acid to CBGa in the presence of GPP (Luo et al., 2019).

[0480] Polyketide synthase enzymes are present across all kingdoms. Dictyostelium discoideum is a species of slime mold that expresses a polyketide synthase called “DiPKS”. Wild type DiPKS is a fusion protein consisting of both a type I fatty acid synthase (“FAS”) and a polyketide synthase, and is referred to as a hybrid “FAS-PKS” protein. Wild-type DiPKS catalyzes synthesis of 4-methyl-5-pentylbenzene-1,3 diol (“MPBD”) from malonyl-CoA. The reaction has a 6:1 stoichiometric ratio of malonyl-CoA to MPBD.

[0481] A mutant form of DiPKS in which glycine 1516 is replaced by arginine (“DiPKS^{G1516R}”) disrupts a methylation moiety of DiPKS. DiPKS^{G1516R} does not synthesize MPBD. In the presence of malonyl-CoA from a glucose source, DiPKS^{G1516R} catalyzes synthesis of only olivetol, and not MPBD (Mookerjee et al., 2018 #1; Mookerjee et al., 2018 #2).

[0482] NpgA is a 4′-phosphopantethienyl transferase from Aspergillus nidulans. Expression of NpgA alongside DiPKS provides the A. nidulans phosphopantetheinyl transferase for greater catalysis of loading the phosphopantetheine group onto the ACP domain of DiPKS. NpgA also supports catalysis by DiPKS^{G1516R}

[0483] The methods and cells lines provided herein may apply and include transgenic Saccharomyces cerevisiae that have been transformed with nucleotide sequences coding for DiPKS^{G1516R}, NpgA, csOAC and PT254. Co-expression of DiPKS^{G1516R}, NpgA and csOAC in S. cerevisiae resulted in production of olivetolic acid in vivo from galactose. Co-expression of DiPKS^{G1516R}, NpgA, csOAC and PT254 in S. cerevisiae resulted in production of CBGa in vivo from galactose. Co-expression of DiPKS^{G1516R}, NpgA, csOAC, PT254 and A9-tetrahydrocannabinolic acid synthase (“THCa Synthase”) in S. cerevisiae resulted in production of A9-tetrahydrocannabinolic acid (“THCa”) in vivo from galactose.

[0484] Use of DiPKS^{G1516R} may provide advantages over csOAS for expression in S. cerevisiae to catalyze synthesis of olivetolic acid. csOAS catalyzes synthesis of olivetol from malonyl-CoA and hexanoyl-CoA. The reaction has a 3:1:1 stoichiometric ratio of malonyl-CoA to hexanoyl-CoA to olivetol. Olivetol synthesized during this reaction is carboxylated when the reaction is completed in the presence of csOAC, resulting in olivetolic acid. Hexanoic acid is toxic to S. cerevisiae. When applying csOAS and csOAC, hexanoyl-CoA is a necessary precursor for synthesis of olivetolic acid and the presence of hexanoic acid may inhibit proliferation of S. cerevisiae. When using DiPKS^{G1516R} and csOAC to produce olivetolic acid rather than csOAS and csOAC, the hexanoic acid need not be added to the growth media. The absence of hexanoic acid in growth media may result in increased growth of the S. cerevisiae cultures and greater yield of olivetolic acid compared with S. cerevisiae cultures fed with csOAS.

[0485] The S. cerevisiae may have one or more mutations in Erg20, Maf1 or other genes for enzymes or other proteins that support metabolic pathways that deplete GPP, the one or more mutations being for increasing available malonyl-CoA, GPP or both. Alternatively to S. cerevisiae, other species of yeast, including Yarrowia lipolytica, Kluyveromyces marxianus, Kluyveromyces lactis, Rhodosporidium toruloides, Cryptococcus curvatus, Trichosporon pullulan and Lipomyces lipoferetc, may be applied.

[0486] Synthesis of olivetolic acid may be facilitated by increased levels of malonyl-CoA in the cytosol. The S. cerevisiae may have overexpression of native acetaldehyde dehydrogenase and expression of a mutant acetyl-CoA synthase or other gene, the mutations resulting in lowered mitochondrial acetaldehyde catabolism. Lowering mitochondrial acetaldehyde catabolism by diverting the acetaldehyde into acetyl-CoA production increases malonyl-CoA available for synthesizing olivetol. Acc1 is the native yeast malonyl CoA synthase. The S. cerevisiae may have over-expression of Acc1 or modification of Acc1 for increased activity and increased available malonyl-CoA. The S. cerevisiae may include modified expression of Maf1 or other regulators of tRNA biosynthesis. Overexpressing native Maf1 has been shown to reduce loss of isopentenyl pyrophosphate (“IPP”) to tRNA biosynthesis and thereby improve monoterpene yields in yeast. IPP is an intermediate in the mevalonate pathway.

[0487] FIG. 28 shows biosynthesis of olivetolic acid from polyketide condensation products of malonyl-CoA and hexanoyl-CoA, as occurs in C. sativa. Olivetolic acid is a metabolic precursor to cannabigerolic acid (“CBGa”). CBGa is a precursor to a large number of downstream phytocannabinoids as described in further detail below. In most varieties of C. sativa, the majority of phytocannabinoids are pentyl-cannabinoids, which are biosynthesized from olivetolic acid, which is in turn synthesized from malonyl-CoA and hexanoyl-CoA at a 3:1 stoichiometric ratio. Some propyl-cannabinoids are observed, and are often identified with a “v” suffix in the widely-used three letter abbreviations (e.g. tetrahydrocannabivarin is commonly referred to as “THCv”, cannabidivarin is commonly referred to as “CBDv”, etc.). Tetrahydrocannabivarin acid may be referred to herein as “THCVa”. FIG. 28 also shows biosynthesis of divarinolic acid from condensation of malonyl-CoA with n-butyl-CoA, which would provide downstream propyl-phytocannabinoids.

[0488] FIG. 28 also shows biosynthesis of orsellinic acid from condensation of malonyl-CoA with acetyl-CoA, which would provide downstream methyl-phytocannabinoids. The term “methyl-phytocannabinoids” in this context means their alkyl side chain is a methyl group, where most phytocannabinoids have a pentyl group on the alkyl side chain and varinnic phytocannabinoids have a propyl group on the alkyl side chain.

[0489] FIG. 28 also shows biosynthesis of 2,4-diol-6-propylbenzenoic acid from condensation of malonyl-CoA with valeryl-CoA, which would provide downstream butyl-phytocannabinoids.

[0490] FIG. 29 shows biosynthesis of CBGa from hexanoic acid, malonyl-CoA, and GPP in C. sativa, including the olivetolic acid biosynthesis step shown in FIG. 28. Hexanoic acid is activated with coenzyme A by hexanoyl-CoA synthase (“Hex1; Reaction 1 in FIG. 29). In C. sativa, a type 3 polyketide synthase called olivetolic acid synthase (“csOAS”) and olivetolic acid cyclase (“csOAC”) together catalyze production of olivetolic acid from hexanoyl CoA and malonyl-CoA (Reaction 2 in FIG. 29). Prenyltransferase combines olivetolic acid with GPP, resulting in CBGa (Reaction 3 in FIG. 29).

[0491] FIG. 30 shows biosynthesis of downstream acid forms of phytocannabinoids in C. sativa from CBGa. CBGa is oxidatively cyclized into A9-tetrahydrocannabinolic acid (“THCa”) by THCa synthase. CBGa is oxidatively cyclized into cannabidiolic acid (“CBDa”) by CBDa synthase. Other phytocannabinoids are also synthesized in C. sativa, such as cannabichromenic acid (“CBCa”), cannabielsoinic acid (“CBEa”), iso-tetrahydrocannabinolic acid (“iso-THCa”), cannabicyclolic acid (“CBLa”), or cannabicitrannic acid (“CBTa”) by other synthase enzymes, or by changing conditions in the plant cells in a way that affects the enzymatic activity in terms of the resulting phytocannabinoid structure. The acid forms of each of these general phytocannabinoid types are shown in FIG. 30 with a general “R” group to show the alkyl side chain, which would be a 5-carbon chain where olivetolic acid is synthesized from hexanoyl-CoA and malonyl-CoA. In some cases, the carboxyl group is alternatively found on a ring position opposite the R group from the position shown in FIG. 30 (e.g. position 4 of A9-tetrahydrocannabinol (“THC”) rather than position 2 as shown in FIG. 30, etc.).

[0492] csOAS uses hexanoyl-CoA as a polyketide substrate. Hexanoic acid is toxic to S. cerevisiae and some other strains of yeast. In addition, synthesis of CBGa from olivetolic acid by the canonical membrane-bound C. sativa prenyltransferase enzyme.

[0493] Another prenyltransferase enzymes identified in C. sativa (“PT254”) may also be applied in yeast-based synthesis.

[0494] Methods and yeast cells as provided herein for production of phytocannabinoids and phytocannabinoid analogues may apply and include S. cerevisiae transformed with a gene for prenyltransferase PT254 from C. sativa.

[0495] Conversion of malonyl-CoA and hexanoyl-CoA to olivetolic acid catalyzed by csOAS at Reaction 2 of FIG. 29 was identified as a metabolic bottleneck in the pathway of FIG. 29. In order to increase yield at Reaction 2 of FIG. 29, multiple enzymes were functionally screened and one enzyme, a polyketide synthase from Dictyostelium discoideum called “DiPKS” was identified that could produce 4-methyl-5-pentylbenzene-1,3 diol (“MPBD”) directly from malonyl-CoA. A CDS for DiPKS is available at the NCBI GenBank online database under Accession Number NC_007087.3.

[0496] FIG. 31 shows production of MPBD from malonyl-CoA as catalyzed by DiPKS.

[0497] FIG. 32 is a schematic of the functional domains of DiPKS. DiPKS includes functional domains similar to domains found in a fatty acid synthase, and in additional includes a methyltransferase domain and a PKS III domain. FIG. 32 shows β-ketoacyl-synthase (“KS”), acyl transacetylase (“AT”), dehydratase (“DH”), C-methyl transferase (“C-Met”), enoyl reductase (“ER”), ketoreductase (“KR”), and acyl carrier protein (“ACP”). The “Type III” domain is a type 3 polyketide synthase. The KS, AT, DH, ER, KR, and ACP portions provide functions typically associated with a fatty acid synthase, speaking to DiPKS being a FAS-PKS protein in this case. The C-Met domain provides catalytic activity for methylating olivetol at carbon 4, providing MPBD.

[0498] The C-Met domain is crossed out in FIG. 32, schematically illustrating modifications to DiPKS protein that inactivate the C-Met domain and mitigate or eliminate methylation functionality. The Type III domain catalyzes iterative polyketide extension and cyclization of a hexanoic acid thioester transferred to the Type III domain from the ACP.

[0499] The C-Met domain of the DiPKS protein includes amino acid residues 1510 to 1633 of DiPKS. The C-Met domain includes three motifs. The first motif includes residues 1510 to 1518. The second motif includes residues 1596 to 1603. The third motif includes residues 1623 to 1633. Disruption of one or more of these three motifs may result in lowered activity at the C-Met domain. A mutant form of DiPKS in which glycine 1516 is replaced by arginine (“DiPKS^{G1516R}”) disrupts a methylation moiety of DiPKS. DiPKS^{G1516R} does not synthesize MPBD. In the presence of malonyl-CoA from a glucose or other sugar source, and in the absence of csOAC or another olivetolic acid cyclase or other polyketide cyclase, DiPKS^{G1516R} catalyzes synthesis of only olivetol, and not MPBD (Mookerjee et al., WO2018148848; Mookerjee et al. WO2018148849).

[0500] Application of DiPKS^{G1516R} rather than csOAS facilitates production of phytocannabinoids and phytocannabinoid analogues without hexanoic acid supplementation. Since hexanoic acid is toxic to S. cerevisiae, eliminating a requirement for hexanoic acid in the biosynthetic pathway for CBGa may provide greater yields of CBGa than the yields of CBGa in a yeast cell expressing csOAS and Hex1.

[0501] FIG. 33 is a schematic of biosynthesis of CBGa in a transformed yeast cell by DiPKS^{G1516R}, csOAC and PT254. DiPKS^{G1516R} and csOAC together catalyze reaction 1 in FIG. 33, resulting in olivetolic acid. PT254 catalyzes reaction 2, resulting in production of CBGa. Any downstream reactions to produce other phytocannabinoids or phytocannabinoid analogues would then correspondingly produce the same acid forms of the phytocannabinoids as would be produced in C. sativa or acid forms of phytocannabinoid analogues.

[0502] The N-end rule in protein degradation determines the half-life of a protein or other polypeptide as described in Varshavsky, A. (2011). The second residue in any polypeptide is recognized by the cell protein degradation machinery and flagged for degradation. The identity of the second amino acid has a demonstrated impact on the half-life of a polypeptide. It was observed that the second amino acid residue of PT254 was an arginine, which shortens the half-life in yeast relative to the half-life observed when the second residue is serine. Thus, this amino acid residue at position 2 of PT254 was changed to serine, resulting in “PT254^{R2S}”. The presence of the serine was hypothesized to increase the half-life of the protein which would result in greater substrate conversion and production of CBGa. As demonstrated by Example 14, PT254^{R2S} outperformed the wild type PT254.

[0503] FIG. 34 shows one example of a downstream phytocannabinoid being produced. In FIG. 34, the pathway of FIG. 33 is extended to include synthesis of THCa by THCa Synthase.

[0504] Transforming and Growing Yeast Cells

[0505] Details of specific examples of methods carried out and yeast cells produced in accordance with this description are provided below as Examples 12 to 14, below. Each of these three specific examples applied similar approaches to plasmid construction, transformation of yeast, quantification of strain growth, and quantification of intracellular metabolites. These common features across the three examples are described below, followed by results and other details relating to one or more of the examples.

[0506] As shown in Table 45, six strains of yeast were prepared. Base strain “HB742” is a uracil and leucine auxotroph CEN PK2 variant of S. cerevisiae with several genetic modifications to increase the availability of biosynthetic precursors and to increase DiPKS^{G1516R} activity. HB742 was prepared from a leucine and uracil auxotroph called “HB42”. In the “Genotype” column, the integration-based modifications are listed in the order they were introduced into the genome. Additional details are in Table 47. Strains “HB801” and “HB814” were based on HB742. Strains “HB861”, “HB862” were based on HB801. Strain HB888 was prepared based on HB814.

TABLE 45
Yeast Strains

| Strain | Background | Plasmids | Genotype | Notes |
|---|---|---|---|---|
| HB742 | -URA, -LEU | None | ΔLEU2 | Base Strain |
| | | | ΔURA3 | |
| | | | NPGA | |
| | | | DiPKS^{G1516R} X 5 | |
| | | | ALD6; ASC1^{L641p} | |
| | | | MAF1 | |
| | | | Erg20^{K197E}::KanMx | |
| | | | UB14p:ERG20 | |
| | | | tHMGR1; IDI | |
| | | | PGK1p:Acc1^{S659A; S1157A} | |
| HB801 | -URA, -LEU | None | (HB742) | Olivetolic acid producing |
| | | | Gal1p:csOAC | strain |
| HB861 | -URA, -LEU | None | (HB801) | CBGA producing strain |
| | | | Gal1p:PT254 | |
| HB862 | -URA, -LEU | None | (HB801) | CBGA producing strain |
| | | | Gal1p:PT254^{R2S} | |
| HB814 | -URA, -LEU | None | (HB742) | Produces neither |
| | | | Gal1p:PT254 | olivetolic acid nor CBGa |
| HB888 | -URA, -LEU | PLAS182 | (HB814) | THCA producing strain |
| | | PLAS251 | | |

[0507] Protein sequences and coding DNA sequences used to prepare the strains in Table 45 are provided below in Table 46 and full sequence listings are provided below.

TABLE 46
Protein and DNA Sequences used to Prepare the Yeast Strains

| SEQ ID NO | Description | DNA/Protein | Length | Coding Sequence |
|---|---|---|---|---|
| 412 | csOAC | Protein | 102 | Entire sequence |
| 413 | PT254 | Protein | 323 | Entire sequence |
| 414 | PT254^{R2S} | Protein | 323 | Entire sequence |
| 415 | Gal1p:csOAC:Eno2t | DNA | 2177 | 842 to 1150 |
| | expression/integration cassette | | | |
| 416 | Gal1p:PT254:Cyc1t | DNA | 3097 | 1162 to 2133 |
| | expression/integration cassette | | | |
| 417 | Gal1p:PT254_R2S:Cyc1t | DNA | 3095 | 1162 to 2133 |
| | expression/integration cassette | | | |
| 418 | PLAS182 | DNA | 4995 | 517 to 822 |
| 419 | PLAS251 | DNA | 7432 | 1 to 1626 |
| 420 | PLAS36 | DNA | 8980 | Not applicable |
| 421 | THCA_synthase_aa | Protein | 518 | Entire sequence |
| 422 | Backbone for pHygro | DNA | 3888 | Cassettes added |
| | (PLAS182) | | | before base-pair 1 of |
| | | | | sequence |
| 423 | Expression cassette for csOAC | DNA | 1093 | 511 to 816 |
| | in PLAS182. | | | |
| | Gal1p:csOAC:Cyc1t | | | |
| 424 | Backbone for pGAL (PLAS251) | DNA | 5058 | Cassettes added |
| | | | | before base-pair 1 of |
| | | | | sequence |
| 425 | Expression cassette for THCA | DNA | 2435 | 587 to 2140 |
| | Synthase in PLAS251. | | | |
| | Gal1p:THCA Synthase:Cyc1t | | | |
| 426 | NpgA | DNA | 3564 | 1170 to 2201 |
| 427 | DiPKS-1 | DNA | 11114 | 849 to 10292 |
| 428 | DiPKS-2 | DNA | 10890 | 717 to 10160 |
| 429 | DiPKS-3 | DNA | 11300 | 795 to 10238 |
| 430 | DiPKS-4 | DNA | 11140 | 794 to 10237 |
| 431 | DiPKS-5 | DNA | 11637 | 1172 to 10615 |
| 432 | PDH | DNA | 7114 | Ald6: 1444 to 2949 |
| | | | | ACS: 3888 to 5843 |
| 433 | Maf1 | DNA | 3256 | 936 to 2123 |
| 434 | Erg20K197E | DNA | 4254 | 2683 to 3423 |
| 435 | Erg1p:UB14-Erg20:deg | DNA | 3503 | 1364 to 2701 |
| 436 | tHMGr-IDI | DNA | 4843 | tHMGR1: |
| | | | | 877 to 2385 |
| | | | | IDI1: 3209 to 4075 |
| 437 | PGK1p:ACC1^{S659A, S1157A} | DNA | 7673 | Pgk1p: 222 to 971 |
| | | | | Acc1^{S659A, S1157A}: |
| | | | | 972 to 7673 |

[0508] Genome Modification of S. cerevisiae

[0509] HB42 was used as a base strain to develop HB742, and in turn all other strains in this experiment. All DNA was transformed into strains using the transformation protocol described in Gietz et al. (2007). Plas 36 was used for the genetic modifications described in this experiment that apply clustered regularly interspaced short palindromic repeats (CRISPR).

[0510] The genome of HB42 was iteratively targeted by gRNA's and Cas9 expressed from PLAS36 to make the following genomic modifications in the order of the Table 47 below. Erg20^{K197E} was already included in HB42 and is marked as being order “0”.

TABLE 47
Gene Integration in HB742

| Order | Modification | Integration | Description | Genetic Structure |
|---|---|---|---|---|
| 0 | Erg20^{K197E} | Chromosomal | Mutant of Erg20 protein that | Tpi1p:ERG20K197E: |
| | SEQ ID NO. 434 | modification | diminishes FPP synthase | Cyc1t::Tef1p:KanMX: |
| | | | activity creating greater pool | Tef1t |
| | | | of GPP precursor. | |
| | | | Negatively affects growth | |
| | | | phenotype. (Oswald et al., | |
| | | | 2007) | |
| 1 | PDH bypass | Flagfeldt Site | Acetaldehyde | 19Up::Tdh3p:Ald6: |
| | SEQ ID NO. 432 | 19 integration | dehydrogenase (ALD6) from | Adh1::Tef1p:seACS1^{L641p}: |
| | | | S. cerevisiae and | Prm9t::19Down |
| | | | acetoacetyl coA synthase | |
| | | | (AscL641 P) from Salmonella | |
| | | | enterica. Will allow greater | |
| | | | accumulation of acetyl-coA | |
| | | | in the cell. (Shiba et al., | |
| | | | 2007) | |
| 2 | NpgA | Flagfeldt Site | Phosphopantetheinyl | Site14Up::Tef1p: |
| | SEQ ID NO. 426 | 14 integration | Transferase from Aspergillus | NpgA:Prm9t:Site14Down |
| | | | niger. Accessory Protein for | |
| | | | DiPKS (Kim et al., 2007) | |
| 3 | Maf1 | Flagfeldt Site 5 | Maf1 is a regulator of tRNA | Site5Up::Tef1p: |
| | SEQ ID NO. 433 | integration | biosynthesis. | Maf1:Prm9t:Site5Down |
| | | | Overexpression in S. | |
| | | | cerevisiae has demonstrated | |
| | | | higher monoterpene (GPP) | |
| | | | yields (Liu et al., 2013) | |
| 4 | PGK1p: | Chromosomal | Mutations in the native S. | Pgk1:ACC1^{S659A, S1157A}: |
| | ACC1^{S659A, S1157A} | Modification | cerevisiae acetyl-coA | Acc1t |
| | SEQ ID NO. 437 | | carboxylase that removes | |
| | | | post-translational | |
| | | | modification based down- | |
| | | | regulation. Leads to greater | |
| | | | malonyl-coA pools. The | |
| | | | promoter of Acc1 was also | |
| | | | changed to a constitutive | |
| | | | promoter for higher | |
| | | | expression. (Shi et al., 2014) | |
| 5 | tHMGR-IDI1 | USER Site X-3 | Overexpression of truncated | X3up::Tdh3p:tHMGR1: |
| | SEQ ID NO. 436 | integration | HMGr1 and IDI1 proteins | Adh1t::Tef1p:IDI1: |
| | | | that have been previously | Prm9t::X3down |
| | | | identified to be bottlenecks | |
| | | | in the S. cerevisiae | |
| | | | terpenoid pathway | |
| | | | responsible for GPP | |
| | | | production. (Ro et al., 2006) | |
| 6 | DiPKS^{G1516R}-1 | USER Site XII- | Type 1 FAS fused to Type 3 | XII-1up::Gal1p: |
| | SEQ ID NO. 427 | 1 integration | PKS from D. discoideum. | DiPKSG1516R: |
| | | (Jensen et al., | Produces Olivetol from | Prm9t::XII1-down |
| | | no date) | malonyl-coA | |
| 7 | Erg1p:UB14- | Flagfeldt Site | Sterol responsive promoter | Site18Up::Erg1p: |
| | Erg20:deg | 18 integration | controlling Erg20 protein | UB14deg:ERG20: |
| | SEQ ID NO. 435 | | activity. Allows for regular | Adh1t:Site18down |
| | | | FPP synthase activity and | |
| | | | uninhibited growth | |
| | | | phenotype until | |
| | | | accumulation of sterols | |
| | | | which leads to a suppression | |
| | | | of expression of enzyme. | |
| | | | (Peng et al., 2018) | |
| 8 | DiPKS^{G1516R}-2 | Wu site 1 | Type 1 FAS fused to Type 3 | Wu1up::Gal1p: |
| | SEQ ID NO. 428 | integration | PKS from D. discoideum. | DiPKSG1516R: |
| | | | Produces Olivetol from | Prm9t::Wu1down |
| | | | malonyl-coA | |
| 9 | DiPKS^{G1516R}-3 | Wu site 3 | Type 1 FAS fused to Type 3 | Wu3up::Gal1p: |
| | SEQ ID NO. 429 | integration | PKS from D. discoideum. | DiPKSG1516R: |
| | | | Produces Olivetol from | Prm9t::Wu3down |
| | | | malonyl-coA | |
| 10 | DiPKS^{G1516R}-4 | Wu site 6 | Type 1 FAS fused to Type 3 | Wu6up::Gal1p: |
| | SEQ ID NO. 430 | integration | PKS from D. discoideum. | DiPKSG1516R: |
| | | | Produces Olivetol from | Prm9t::Wu6down |
| | | | malonyl-coA | |
| 11 | DiPKS^{G1516R}-5 | Wu site 18 | Type 1 FAS fused to Type 3 | Wu18up::Gal1p: |
| | SEQ ID NO. 431 | integration | PKS from D. discoideum. | DiPKSG1516R: |
| | | | Produces Olivetol from | Prm9t::Wu18down |
| | | | malonyl-coA | |

[0511] The S. cerevisiae strains described herein may be prepared by stable transformation of plasmids, genome integration or other genome modification. Genome modification may be accomplished through homologous recombination, including by methods leveraging CRISPR.

[0512] Methods applying CRISPR were applied to delete DNA from the S. cerevisiae genome and introduce heterologous DNA into the S. cerevisiae genome. Guide RNA (“gRNA”) sequences for targeting the Cas9 endonuclease to the desired locations on the S. cerevisiae genome were designed with Benchling online DNA editing software. DNA splicing by overlap extension (“SOEing”) and PCR were applied to assemble the gRNA sequences and amplify a DNA sequence including a functional gRNA cassette.

[0513] The functional gRNA cassette, a Cas9-expressing gene cassette, and the pYes2 (URA) plasmid were assembled into the PLAS36 plasmid and transformed into S. cerevisiae for facilitating targeted DNA double-stranded cleavage. The resulting DNA cleavage was repaired by the addition of a linear fragment of target DNA (“Donor DNA”).

[0514] Linear Donor DNA for introduction into S. cerevisiae were amplified by polymerase chain reaction (“PCR”) with primers from Operon Eurofins and Phusion HF polymerase (ThermoFisher F-530S) according to the manufacturer's recommended protocols using an Eppendorf Mastercycler ep Gradient 5341. Each genomic integration Donor DNA includes three DNA sequences amplified by PCR. The expression cassette includes part of the homology region of the genome, and is amplified by PCR from that homology region. The genomic homology regions are amplified from the genome with homology to the expression cassette added on by primers. Primers for PCR that amplify the expression cassette also add a homology tail, that adds to the genomic integration region.

[0515] Integration site homology sequences for integration into the S. cerevisiae genome using CRISPR may be at Flagfeldt sites. A description of Flagfeldt sites is provided in Bai Flagfeldt, et al., (2009). Other integration sites may be applied as indicated in Table 47.

[0516] Increasing Availability of Biosynthetic Precursors

[0517] The biosynthetic pathway shown in FIG. 33 and FIG. 34 each require malonyl-CoA and GPP to produce CBGa. Yeast cells may be mutated, genes from other species may be introduced, genes may be upregulated or downregulated, or the yeast cells may be otherwise genetically modified to increase production of olivetolic acid, CBGa or downstream phytocannabinoids. In addition to introduction of a polyketide synthase such as DiPKS^{G1516R}, an olivetolic acid cyclase such as csOAC, and a prenyltransferase such as PT254, additional modifications may be made to the yeast cell to increase the availability of malonyl-CoA, GPP, or other input metabolites to support the biosynthetic pathways of any of FIG. 33 and FIG. 34.

[0518] As shown in FIG. 32, DiPKS^{G1516R} includes an ACP domain. The ACP domain of DiPKS^{G1516R} requires a phosphopantetheine group as a co-factor. NpgA is a 4′-phosphopantethienyl transferase from Aspergillus nidulans. A codon-optimized copy of NpgA for S. cerevisiae may be introduced into S. cerevisiae and transformed into the S. cerevisiae, including by homologous recombination. In HB742, an NpgA gene cassette was integrated into the genome of Saccharomyces cerevisiae at Flagfeldt site 14.

[0519] Expression of NpgA provides the A. nidulans phosphopantetheinyl transferase for greater catalysis of loading the phosphopantetheine group onto the ACP domain of DiPKS^{G1516R}As a result, the reaction catalyzed by DiPKS^{G1516R} (reaction 1 in FIG. 33 and FIG. 34) may occur at greater rate, providing a greater amount of olivetolic acid for prenylation to CBGa. As shown in Table 45, HB742 includes an integrated polynucleotide including a coding sequence NpgA, as does each modified yeast strain based on HB742 (HB801, HB861, HB862, HB814 and H B888).

[0520] The sequence of the integrated DNA coding for NpgA is shown in SEQ ID NO: 426, and includes the Tef1 Promoter, the NpgA coding sequence and the Prm9 terminator. Together the Tef1p, NpgA, and Prm9t are flanked by genomic DNA sequences promoting integration into Flagfeldt site 14 in the S. cerevisiae genome.

[0521] SEQ ID NO: 427, SEQ ID NO:428, SEQ ID NO:429, SEQ ID NO:430 and SEQ ID NO:431 each include a copy of DiPKS^{G1516R} flanked by the Gall promoter, the Prm9 terminator, and integration sequences for the sites indicated in Table 47.

[0522] The yeast strains may be modified for increasing available malonyl-CoA. Lowered mitochondrial acetaldehyde catabolism results in diversion of the acetaldehyde from ethanol catabolism into acetyl-CoA production, which in turn drives production of malonyl-CoA and downstream polyketides and terpenoids. S. cerevisiae may be modified to express an acetyl-CoA synthase from Salmonella enterica with a substitution modification of Leucine to Proline at residue 641 (“ACS^{L641P}”), and with aldehyde dehydrogenase 6 from S. cerevisiae (“Ald6”). The Leu641 Pro mutation removes downstream regulation of Acs, providing greater activity with the Acs^{L641P} mutant than the wild type Acs. Together, cytosolic expression of these two enzymes increases the concentration of acetyl-CoA in the cytosol. Greater acetyl-CoA concentrations in the cytosol result in lowered mitochondrial catabolism, bypassing mitochondrial pyruvate dehydrogenase (“PDH”), providing a PDH bypass. As a result, more acetyl-CoA is available for malonyl-CoA production.

[0523] SEQ ID NO:432 includes coding sequences for the genes for Ald6 and SeAcsL641P, promoters, terminators, and integration site homology sequences for integration into the S. cerevisiae genome at Flagfeldt-site 19. As shown in Table 47 a portion of SEQ ID NO:432 from bases 1444 to 2949 codes for Ald6 under the TDH3 promoter, and bases 3888 to 5843 code for SeAcsL641P under the Tef1 P promoter.

[0524] S. cerevisiae may include modified expression of Maf1 or other regulators of tRNA biosynthesis. Overexpressing native Maf1 has been shown to reduce loss of IPP to tRNA biosynthesis and thereby improve monoterpene yields in yeast. IPP is an intermediate in the mevalonate pathway. As shown in Table 45, HB742 includes an integrated polynucleotide including a coding sequence for Maf1 under the Tef1 promoter, as does each modified yeast strain based on HB742 (H1B801, H B861, H B862, H B814 and H B888).

[0525] SEQ ID NO:433 is a polynucleotide that was integrated into the S. cerevisiae genome at Flagfeldt-site 5 for genomic integration of Maf1 under the Tef1 promoter. SEQ ID NO: 433 includes the Tef1 promoter, the native Maf1 gene, and the Prm9 terminator. Together, Tef1, Maf1, and Prm9 are flanked by genomic DNA sequences for promoting integration into the S. cerevisiae genome.

[0526] The yeast cells may be modified for increasing available GPP. S. cerevisiae may have one or more other mutations in Erg20 or other genes for enzymes that support metabolic pathways that deplete GPP. Erg20 catalyzes GPP production in the yeast cell. Erg20 also adds one subunit of 3-isopentyl pyrophosphate (“IPP”) to GPP, resulting in farnesyl pyrophosphate (“FPP”), a metabolite used in downstream sesquiterpene and sterol biosynthesis. Some mutations in Erg20 have been demonstrated to reduce conversion of GPP to FPP, increasing available GPP in the cell. A substitution mutation Lys197Glu in Erg20 lowers conversion of GPP to FPP by Erg20. As shown in Table 45, base strain HB742 expresses the Erg20^{K197E} mutant protein. Similarly, each modified yeast strain based on any of HB742, (HB801, HB861, HB862, HB814 and HB888) includes an integrated polynucleotide coding for the Erg20^{K197E} mutant integrated into the yeast genome.

[0527] SEQ ID NO:434 is a CDS coding for the Erg20^{K197E} protein under control of the Tpi1p promoter and the Cyc1t terminator, and a coding sequence for the KanMX protein under control of the Tef1p promoter and the Tef1t terminator.

[0528] SEQ ID NO:435 is a CDS coding for the Erg20 protein under control of the Erg1p promoter and the Adh1t terminator, and flanking sequences for homologous recombination. The Erg1 promoter is downregulated by the presence of large amounts of Ergosterol in the cell. When the cells are growing and there is not much ergosterol in the cell, the Erg1 promoter aids in the expression of the native Erg20 protein that allows the cells to grow without any growth defects associated with the attenuation of FPP synthase activity. When the cells have high amounts of ergosterol present in later stages of growth then the Erg1 promoter is inhibited leading to the cessation of expression of the native Erg20 protein. The extant copies of the native Erg20 protein in the cell are quickly degraded due to the UB14 degradation tag. This allows the mutant Erg20K197E to be functional leading to GPP accumulation.

[0529] SEQ ID NO:436 is a CDS coding for the truncated HMGr1 under control of the Tdh3p promoter and the Adh1t terminator, and the IDI1 protein under control of the Tef1p promoter and the Prm9t terminator, and flanking sequences for homologous recombination of both sequences for genome integration. The HMG1 protein catalyzed reduction and the IDI1 catalyzed isomerization have previously been identified as rate limiting steps in the eukaryotic mevalonic pathway. Thus, over-expression of these proteins have been demonstrated to alleviate the bottlenecks in the mevalonate pathway and increase the carbon flux for GPP and FPP production.

[0530] Another approach to increasing cytosolic malonyl-CoA is to upregulate Acc1, which is the native yeast malonyl-CoA synthase. In HB742, the promoter sequence of the Acc1 gene was replaced by a constitutive yeast promoter for the PGK1 gene. The promoter from the PGK1 gene allows multiple copies of Acc1 to be present in the cell. The native Acc1 promoter allows only a single copy of the protein to be present in the cell at a time. As shown in Table 45, base strain HB742 includes the Acc1 under the PGK1 promoter, as does each modified yeast strain based on HB742 (H1B801, H B861, H B862, H B814 and H B888).

[0531] In addition to upregulating expression of Acc1, S. cerevisiae may include one or more modifications of Acc1 to increase Acc1 activity and cytosolic acetyl-CoA concentrations. Two mutations in regulatory sequences were identified in literature that remove repression of Acc1, resulting in greater Acc1 expression and higher malonyl-CoA production. HB742 includes a coding sequence for the Acc1 gene with Ser659Ala and Ser1157Ala modifications flanked by the PGK1 promoter and the Acc1 terminator. As a result, the S. cerevisiae transformed with this sequence will express Acc1^{S659A; S1157A}. As shown in Table 45, base strain HB742 includes Acc1^{S659A; S1157A}, as does each modified yeast strain based on HB742 (HB801, HB861, HB862, HB814 and HB888).

[0532] SEQ ID NO:437 is a polynucleotide that may be used to modify the S. cerevisiae genome at the native Acc1 gene by homologous recombination. SEQ ID NO:437 includes a portion of the coding sequence for the Acc1 gene with Ser659Ala and Ser1167Ala modifications. A similar result may be achieved, for example, by integrating a sequence with the Tef1 promoter, the Acc1 with Ser659Ala and Ser1167Ala modifications, and the Prm9 terminator at any suitable site. The end result would be that Tef1, Acc1^{S659A; S1167A} and Prm9 are flanked by genomic DNA sequences for promoting integration into the S. cerevisiae genome.

[0533] Plasmid Construction

[0534] Plasmids synthesized to apply and prepare examples of the methods and yeast cells provided herein are shown in Table 48.

TABLE 48
Plasmids and Cassettes Used to Prepare Yeast Strains

| Plasmid Name | Description | Selection |
|---|---|---|
| PLAS182 | pDiddy_hygro_Gal1p-csOAC-Cyc1t | Hygromycin |
| PLAS251 | pGAL_ProA_THCaSynthase | Uracil |
| PLAS36 | pCAS_Hyg_Rnr2p:Cas9: | Hygromycin |
| | Cyc1t::tRNATyr:HDV:gRNA:Snr52t | |

[0535] The plasmids PLAS182, PLAS251 and PLAS36 were synthesized using services provided by Twist Bioscience Corporation

[0536] Stable Transformation for Strain Construction

[0537] Plasmids were transformed into S. cerevisiae using the lithium acetate heat shock method as described by Gietz, et al. (2007). S. cerevisiae HB888 was were prepared by transformation of HB814 with expression plasmids PLAS182 and PLAS251.

[0538] To create a stably transformed CBGa producing strain csOAC was first stably transformed. The genome at Flagfeldt position 16 in HB742 was targeted using Cas9 and gRNA expressed from PLAS36. The donor for the recombination was SEQ ID NO.415. Successful integrations were confirmed by colony polymerase chain reaction (“PCR”) and led to the creation of HB801 with a Galactose inducible csOAC encoding gene integrated into the genome of HB742. The genomic region containing SEQ ID NO.415 was also verified by sequencing to confirm the presence of the csOAC encoding gene.

[0539] HB801 was used to create HB861 and HB862 in a similar process. PLAS36 expressing the gRNA targeting Flagfeldt position 20 was transformed into strain HB801 along with the donors SEQ ID NO.416 and SEQ ID NO.417. Successful integrations were screened by colony PCR and verified by sequencing the genomic region containing the integrated DNA. All sequencing was performed by Eurofins Genomics. HB861 has SEQ ID NO. 416 integrated into the genome while HB862 has SEQ ID NO. 417 integrated into the genome.

[0540] HB742 was also used as the base strain to create a THCa producing strain HB888. PLAS36 expressing a gRNA targeting Flagfeldt position 20 and SEQ ID NO.416 were transformed into HB742 with the aim of integrating galactose inducible PT254 expressing gene into the genome. Successful integrations were screened by colony PCR and verified by sequencing the genomic region containing the integrated DNA. The integration of SEQ ID NO.416 into HB742 created strain HE 814. PLAS182 encodes a galactose inducible csOAC gene and PLAS251 encodes a galactose inducible THCa synthase with a proA tag fused to the N-terminal of the THCa synthase. These two plasmids, PLAS182 and PLAS25, were subsequently transformed into strain HB814 to produce strain HB888.

[0541] Yeast Growth and Feeding Conditions

[0542] Yeast cultures were grown in overnight cultures with selective media to provide starter cultures. The resulting starter cultures were then used to inoculate experimental replicate cultures to an optical density at having an absorption at 600 nm (“A₆₀₀”) of 0.1.

[0543] Table 49 shows the uracil drop out (“URADO”) amino acid supplements that are added to yeast synthetic dropout media supplement lacking leucine and uracil. “YNB” is a nutrient broth including the chemicals listed in the first two columns of Table 49. The chemicals listed in the third and fourth columns of Table 49 are included in the URADO supplement.

TABLE 49
YNB Nutrient Broth and URADO Supplement

| YNB | | | URADO Supplement | | |
|---|---|---|---|---|---|
| Chemical | Concentration | | Chemical | Concentration | |
| Ammonium Sulphate | 5 | g/L | Adenine | 18 | mg/L |
| Biotin | 2 | μg/L | p-Aminobenzoic acid | 8 | mg/L |
| Calcium pantothenate | 400 | μg/L | Alanine | 76 | mg/ml |
| Folic acid | 2 | μg/L | Arginine | 76 | mg/ml |
| Inositol | 2 | mg/L | Asparagine | 76 | mg/ml |
| Nicotinic acid | 400 | μg/L | Aspartic Acid | 76 | mg/ml |
| p-Aminobenzoic acid | 200 | μg/L | Cysteine | 76 | mg/ml |
| Pyridoxine HCl | 400 | μg/L | Glutamic Acid | 76 | mg/ml |
| Riboflavin | 200 | μg/L | Glutamine | 76 | mg/ml |
| Thiamine HCL | 400 | μg/L | Glycine | 76 | mg/ml |
| Citric acid | 0.1 | g/L | Histidine | 76 | mg/ml |
| Boric acid | 500 | μg/L | myo-Inositol | 76 | mg/ml |
| Copper sulfate | 40 | μg/L | Isoleucine | 76 | mg/ml |
| Potassium iodide | 100 | μg/L | Leucine | 152 | mg/ml |
| Ferric chloride | 200 | μg/L | Lysine | 76 | mg/ml |
| Magnesium sulfate | 400 | μg/L | Methionine | 76 | mg/ml |
| Sodium molybdate | 200 | μg/L | Phenylalanine | 76 | mg/ml |
| Zinc sulfate | 400 | μg/L | Proline | 76 | mg/ml |
| Potassium phosphate monobasic | 1.0 | g/L | Serine | 76 | mg/ml |
| Magnesium sulfate | 0.5 | g/L | Threonine | 76 | mg/ml |
| Sodium chloride | 0.1 | g/L | Tryptophan | 76 | mg/ml |
| Calcium chloride | 0.1 | g/L | Tyrosine | 76 | mg/ml |

| | | | | |
|---|---|---|---|---|
| (blank cell) | (blank cell) | Valine | 76 | mg/ml |

[0544] Quantification of Metabolites

[0545] Metabolite extraction was performed with 300 μl of Acetonitrile added to 100 μl culture in a new 96-well deepwell plate, followed by 30 min of agitation at 950 rpm. The solutions were then centrifuged at 3750 rpm for 5 min. 200 μl of the soluble layer was removed and stored in a 96-well v-bottom microtiter plate. Samples were stored at −20° C. until analysis.

[0546] Intracellular metabolites were quantified using high performance liquid chromatography (“HPLC”) and mass spectrometry (“MS”) methods. Quantification of olivetolic acid, CBGa and THCa was performed using HPLC-MS on an Acquity UPLC-TQD MS.

[0547] Quantification of CBGa and THCa was performed by HPLC on a Hypersil Gold PFP 100×2.1 mm column with a 1.9 μm particle size. Eluent A—0.1% formic acid in water. Eluent B—0.1% formic acid in acetonitrile. An isocratic mix of 51% eluent B was applied initially and at 2.5 minutes. The column temperature was 45° C. and the flow rate was 0.6 ml/min.

[0548] After HPLC separation, samples were injected into the mass spectrometer by electrospray ionization and analyzed in negative mode. The capillary temperature was held at 380° C. The capillary voltage was 3 kV, the source temperature was 150° C., the desolvation gas temperature was 450° C., the desolvation gas flow (nitrogen) was 800 L/hr, and the cone gas flow (nitrogen) was 50 L/hr. Detection parameters for CBGa and THCa are provided in Table 50.

[0549] Quantification of olivetolic acid was performed by HPLC on a Waters HSS 1×50 mm column with a 1.8 μm particle size. Eluent A was 0.1% formic acid in water, and eluent B was 0.1% formic acid in acetonitrile. The ratios of A1:B1 were 70/30 at 0.00 min; 50/50 at 1.2 min; 30/70 at 1.70 min, and 70/30 at 1.71 min. The column temperature was 45° C., the flow rate was 0.6 ml/min.

[0550] After HPLC separation, samples were injected into the mass spectrometer by electrospray ionization and analyzed in positive mode. The capillary temperature was held at 380° C. The capillary voltage was 3 kV, the source temperature was 150° C., the desolvation gas temperature was 450° C., the desolvation gas flow (nitrogen) was 800 L/hr, and the cone gas flow (nitrogen) was 50 L/hr. A transition of →171 and a collision of 20 V were applied to olivetolic acid. Detection parameters for CBGa and THCa are provided in Table 50.

TABLE 50
Detection parameters for CBGa and THCa

| Parameter | Olivetolic Acid | CBGa | THCa |
|---|---|---|---|
| Retention time | 1.28 min | 1.19 min | 1.50 min |
| Ion | [M − H]⁺ | [M − H]⁻ | [M − H]⁻ |
| Mass (m/z) | 223.01 | 359.2 | 357.2 |
| Mode | ES+, MRM | ES−, SIR | ES−, SIR |
| Span | 0 | 0 | 0 |
| Dwell (s) | 0.2 | 0.2 | 0.2 |
| Cone (V) | 35 | 30 | 30 |

[0551] Different concentrations of known standards were injected to create a linear standard curve. Standards for Olivetolic Acid, CBGa and THCa were purchased from Toronto Research Chemicals. Olivetol was not quantified but would have been quantified with a retention time of 1.40 min.

### EXAMPLES—PART 4

### Example 12

[0552] Twelve single colony replicates of strains HB861 and HB862 were grown in synthetic complete (“SC”), containing 1.7 g/L YNB without ammonium sulfate, 1.96 g/L URADO supplement, 76 mg/L uracil, 1.5 g/L magnesium L-glutamate, 2% w/v glucose or galactose, 2% w/v raffinose, 200 μg/l geneticin and 200 ug/L ampicillin. Both HB861 and HB862 strains were grown in 1 ml cultures in 96-well deepwell plates. The deepwell plates were incubated at 30° C. and shaken at 250 rpm for 96 hrs.

[0553] FIG. 35 shows the yields of olivetolic acid from HB801.

[0554] FIG. 36 shows production of CBGa by DiPKS^{G1516R}, csOAC and PT254 in two strains of S. cerevisiae.

[0555] FIG. 37 shows the yield of olivetolic acid from HB801, HB861 and HB862. Production of olivetolic acid from raffinose and galactose was observed, demonstrating direct production in yeast of olivetolic acid without hexanoic acid. Olivetolic acid production was induced by activating the inducible galactose promoter for csOAC in the presence of galactose but not glucose. The olivetolic acid was produced at 36.95+/−5.63 mg/L by HB801, 23.49+/−2.37 mg/L by HB861 and 32.24+/−5.22 mg/L by HB862. The “+/−” indicates standard deviation.

### Example 13

[0556] Twelve single colony replicates of strains HB861 and HB862 were grown in SC, containing 1.7 g/L YNB without ammonium sulfate, 1.96 g/L URADO supplement, 76 mg/L uracil, 1.5 g/L magnesium L-glutamate, 2% w/v glucose or galactose, 2% w/v raffinose, 200 μg/l geneticin and 200 ug/L ampicillin. HB861 and HB862 strains were grown in 1 ml cultures in 96-well deepwell plates. Plates were incubated at 30° C. and shaken at 250 rpm for 96 hrs.

[0557] FIG. 36 and FIG. 37 each show the yields of CBGa from HB861 and HB862. Production of CBGa from raffinose and galactose was observed, demonstrating direct production in yeast of CBGa without hexanoic acid. CBGa production was induced by activating the inducible galactose promoter for PT254 in the presence of galactose but not glucose. The CBGa was produced at 22.00+/−3.4 mg/L by HB861 and at 42.68+/−3.49 mg/L by HB862. The “+/−” indicates standard deviation. The PT254_R2S mutant outperformed the wild type PT254.

### Example 14

[0558] Twelve single colony replicates of strain HB888 was grown in URADO minimal media, containing 1.7 g/L YNB without ammonium sulfate, 1.96 g/L URADO supplement, 1.5 g/L magnesium L-glutamate, 2% w/v glucose or galactose, 2% w/v raffinose, 200 μg/l geneticin, 200 ug/L hygromycin and 200 ug/L ampicillin. HB888 was grown in 1 ml cultures in 96-well deepwell plates. The deepwell plates were incubated at 30° C. and shaken at 250 rpm for 96 hrs.

[0559] FIG. 38 shows the yields of THCa by HB888. Production of THCa from raffinose and galactose was observed, demonstrating direct production in yeast of THCa without hexanoic acid. THCa production was induced by activating the inducible galactose promoter for PT254 in the presence of galactose but not glucose. The THCa was produced at 0.48+/−0.10 mg/L by HB888. The “+/−” indicates standard deviation.

[0560] Part 5

[0561] Prenyltransferases from Stachybotrys for the Production of Phytocannabinoids

[0562] The present disclosure relates generally to proteins, and cell lines, and methods for the production of phytocannabinoids in host cells involving prenyltransferases from Stachybotrys.

[0563] Overview

[0564] Prenyltransferases are provided herein, which may be used in the production of a phytocannabinoid or a phytocannabinoid analogue in a host cell. The production of a phytocannabinoid or a phytocannabinoid analogue in a host cell may be conducted according to a method that comprises transforming the host cell with a sequence encoding the prenyltransferase protein for catalysing the reaction of a polyketide with a prenyl donor. Such a transformed host cell can be cultured to produce the phytocannabinoid or phytocannabinoid analogue.

[0565] There is provided herein a method of producing a phytocannabinoid or phytocannabinoid analogue in a host cell that produces a polyketide and a prenyl donor, said method comprising: transforming said host cell with a sequence encoding a prenyltransferase PT72, PT273, and PT296 protein, and culturing the transformed host cell to produce the phytocannabinoid or phytocannabinoid analogue.

[0566] There is also provided herein a method of producing a phytocannabinoid or phytocannabinoid analogue, comprising providing a host cell which produces a polyketide precursor and a prenyl donor; introducing into the host cell a polynucleotide encoding a prenyltransferase PT72, PT273, or PT296 protein; and culturing the host cell under conditions sufficient for production of PT72, PT273, or PT296 for producing the phytocannabinoid or phytocannabinoid analogue from the polyketide precursor and the prenyl donor.

[0567] Additionally, there is provided herein an expression vector comprising a nucleotide sequence encoding the prenyltransferase PT72, PT273, or PT296 protein, wherein the nucleotide sequence comprises at least 70% identity with a polynucleotide encoding the PT72, PT273, or PT296 protein.

[0568] Host cells transformed with the expression vector are also described.

### Detailed Description of Part 5

[0569] Generally, there is described herein the production of phyotocannabinoids or phytocannabinoid analogues.

[0570] The method described herein produces a phytocannabinoid or a phytocannabinoid analogue in a host cell, which host cell comprises or is capable of producing a polyketide and a prenyl donor. The method comprises transforming the host cell with a sequence encoding a prenyltransferase PT72, PT273, or PT296 protein, and subsequently culturing the transformed cell to produce said phytocannabinoid or phytocannabinoid analogue.

[0571] The PT72, PT273, and PT296 proteins may have one of the following characteristics: (a) a protein as set forth in SEQ ID NO:438, SEQ ID NO:439, or SEQ ID NO:440; (b) a prenyltransferase protein with at least 70% identity with SEQ ID NO:438, SEQ ID NO:439, or SEQ ID NO:440; (c) a protein that differs from (a) by one or more residues that are substituted, deleted and/or inserted; or (d) a derivative of (a), (b), or (c).

[0572] The nucleotide sequence encoding the prenyltransferase PT72, PT273, or PT296 protein may have one of the following characteristics: (a) a nucleotide sequence encoding a protein as set forth in SEQ ID NO:438, SEQ ID NO:439, or SEQ ID NO:440; or having a sequence according to SEQ ID NO:459, SEQ ID NO:460, or SEQ ID NO:461; (b) a nucleotide sequence encoding a prenyltransferase protein having at least 70% identity with SEQ ID NO:438, SEQ ID NO:439, or SEQ ID NO:440; or having at least 70% identity with SEQ ID NO:459, SEQ ID NO:460, or SEQ ID NO:461; (c) a nucleotide sequence that hybridizes with the complementary strand of the nucleic acid of (a) under conditions of high stringency; (d) a nucleotide sequence that differs from (a) by one or more nucleotides that are substituted, deleted, and/or inserted; or (e) a derivative of (a), (b), (c), or (d).

[0573] The polyketide may be one of the following:

[chemical structure]

[chemical structure]

[0574] The prenyl donor may have the following structure:

[chemical structure]

[0575] For example, the prenyl donor may be geranyl diphosphate (GPP), farnesyl diphosphate (FPP), or neryl diphosphate (NPP).

[0576] The prenylated polyketide structure for the phytocannabinoid or phytocannabinoid analogue formed may be:

[chemical structure]

[0577] The protein encoded by the nucleotide sequence with which the host cell is transformed may have at least 70%, 71%, 72%, 73%, 74%, 75%, 76%, 77%, 78%, 79%, 80%, 81%, 82%, 83%, 84%, 85%, 86%, 87%, 88%, 89%, 90%, 91%, 92%, 93%, 94%, 95%, 96%, 97%, 98%, or 99% sequence identity to the prenyltransferase PT72, PT273, or PT296 protein of SEQ ID NO: 438, SEQ ID NO:439 or SEQ ID NO:440.

[0578] The nucleotide sequence may have at least 70%, 71%, 72%, 73%, 74%, 75%, 76%, 77%, 78%, 79%, 80%, 81%, 82%, 83%, 84%, 85%, 86%, 87%, 88%, 89%, 90%, 91%, 92%, 93%, 94%, 95%, 96%, 97%, 98%, or 99% sequence identity to SEQ ID NO:459, SEQ ID NO:460, or SEQ ID NO:4661; or to a polynucleotide encoding any one of SEQ ID NO:438, SEQ ID NO:439 or SEQ ID NO:440.

[0579] The polyketide prenylated in the method may be olivetol, olivetolic acid, divarin, divarinic acid, orcinol, or orsellinic acid.

[0580] The phytocannabinoid so formed may be cannabigerol (CBG), cannabigerolic acid (CBGa), cannabigerovarin (CBGv), cannabigerovarinic acid (CBGva), cannabigerocin (CBGO), or cannabigerocinic acid (CBGOa).

[0581] As exemplary embodiments, when the polyketide is olivetol then the phytocannabinoid formed is cannabigerol (CBG); when the polyketide is olivetolic acid then the phytocannabinoid formed is cannabigerolic acid (CBGa); when the polyketide is divarin then the phytocannabinoid formed is cannabigerovarin (CBGv); when the polyketide is divarinic acid then the phytocannabinoid formed is cannabigerovarinic acid (CBGva); when the polyketide is orcinol then the phytocannabinoid is cannabigerocin (CBGO); and when the polyketide is orsellinic acid then the phytocannabinoid is cannabigerocinic acid (CBGOa).

[0582] The host cell can be a fungal cell such as yeast, a bacterial cell, a protist cell, or a plant cell, such as any of the exemplary cell types noted herein. Exemplary host cell types include S. cerevisiae, E. coli, Yarrowia lipolytica, and Komagataella phaffii.

[0583] A method is described for producing a phytocannabinoid or phytocannabinoid analogue, comprising: providing a host cell which produces a polyketide precursor and a prenyl donor, introducing into the host cell a polynucleotide encoding a prenyltransferase PT72, PT273, or PT296 protein, and culturing the host cell under conditions sufficient for production of the prenyltransferase PT72, PT273, or PT296 protein for producing the phytocannabinoid or phytocannabinoid analogue from the polyketide precursor and the prenyl donor.

[0584] In any of the methods described herein, the host cell may have one or more additional genetic modification, such as for example: (a) a nucleic acid as set forth in any one of SEQ ID NO:441 to SEQ ID NO:453; (b) a nucleic acid having at least 70% identity with the nucleotide sequence of (a); (c) a nucleic acid that hybridizes with the complementary strand of the nucleic acid of (a) under stringent conditions; (d) a nucleic acid encoding a polypeptide with the same enzyme activity as the polypeptide encoded by any one of the nucleic acid sequences of (a); (e) a nucleotide sequence that differs from (a) by one or more nucleotides that are substituted, deleted, and/or inserted; or (f) a derivative of (a), (b), (c), (d), or (e). Such an additional genetic modification may comprise, for example, one or more of NpgA (SEQ ID NO:441), PDH (SEQ ID NO:447), Maf1 (SEQ ID NO:448), Erg20K197E (SEQ ID NO:449), tHMGr-IDI (SEQ ID NO:451), and/or PGK1p:ACC^{1S659A,S1157A} (SEQ ID NO:452).

[0585] One or more genetic modification may be made to the host cell in order to increase the available pool of terpenes and/or malonyl-coA in the cell. For example, such a genetic modification may include tHMGr-IDI (SEQ ID NO:451); PGK1p:ACC^{1S659A,S1157A} (SEQ ID NO:452); and/or Erg20K197E (SEQ ID NO:449).

[0586] There is described herein an expression vector comprising a nucleotide sequence encoding prenyltransferase PT72, PT273, or PT296 protein, wherein the nucleotide sequence comprises at least 70% identity with SEQ ID NO:459, SEQ ID NO:460, or SEQ ID NO:461; with a polynucleotide encoding PT72, PT273, or PT296; or with a nucleotide encoding prenyltransferase protein that comprises at least 70% identity with SEQ ID NO:438, SEQ ID NO:439, or SEQ ID NO:440.

[0587] In such an expression vector, the nucleotide sequence encoding the prenyltransferase PT72, PT273, or PT296 protein may comprises, for example, at least 71%, 72%, 73%, 74%, 75%, 76%, 77%, 78%, 79%, 80%, 81%, 82%, 83%, 84%, 85%, 86%, 87%, 88%, 89%, 90%, 91%, 92%, 93%, 94%, 95%, 96%, 97%, 98%, or 99% sequence identity with SEQ ID NO:459, SEQ ID NO:460, or SEQ ID NO:461; or with a polynucleotide encoding any one of PT72, PT273, or PT296.

[0588] In such an expression vector the prenyltransferase PT72, PT273, or PT296 protein encoded may have at least 71%, 72%, 73%, 74%, 75%, 76%, 77%, 78%, 79%, 80%, 81%, 82%, 83%, 84%, 85%, 86%, 87%, 88%, 89%, 90%, 91%, 92%, 93%, 94%, 95%, 96%, 97%, 98%, or 99% sequence identity with SEQ ID NO:438, SEQ ID NO:439, or SEQ ID NO:440.

[0589] A host cell is described herein that is transformed with any one of the expression vectors describe, wherein transformation occurs according to any known process. Such a host cell may additionally comprising one or more of: (a) a nucleic acid as set forth in any one of SEQ ID NO:441 to SEQ ID NO:453; (b) a nucleic acid having at least 70% identity with the nucleotide sequence of (a); (c) a nucleic acid that hybridizes with the complementary strand of the nucleic acid of (a), and this hybridization may occur under stringent conditions; (d) a nucleic acid encoding a protein with the same enzyme activity as the protein encoded by any one of the nucleic acid sequences of (a); (e) a nucleic acid that differs from (a) by one or more nucleotides that are substituted, deleted, and/or inserted; or (f) a derivative of (a), (b), (c), (d), or (e).

[0590] The host cell may be a fungal cell such as yeast, a bacterial cell, a protist cell, or a plant cell, such as any cell described herein. Exemplary cells include S. cerevisiae, E. coli, Yarrowia lipolytica, and Komagataella phaffii.

[0591] The methods, vectors, and cell lines described herein may advantageously be used for the production of phytocannabinoids. By utilizing a protein having prenyltransferase activity, such as PT72, PT273, or PT296, the transformation into a heterologous host cell permits the production of cannabinoids without requiring growth of a whole plant. Cannabinoids such as, but not limited to, CBGa and CBGOa, can be prepared and isolated economically and under controlled conditions. Advantageously, it has been found that PT72, PT273, and PT296 function well in host cells, such as but not limited to yeast, permitting efficient prenylation of aromatic polyketides in the pathway of phytocannabinoid synthesis.

[0592] Phytocannabinoids are a large class of compounds with over 100 different known structures that are produced in the Cannabis sativa plant. These bio-active molecules, such as tetrahydrocannabinol (THC) and cannabidiol (CBD), can be extracted from plant material for medical and recreational purposes.

[0593] Phytocannabinoids are synthesized from polyketide and terpenoid precursors which are derived from two major secondary metabolism pathways in the cell. For example, the C—C bond formation between the polyketide olivetolic acid and the allylic isoprene diphosphate geranyl pyrophosphate (GPP) produces the cannabinoid cannabigerolic acid (CBGa). This reaction type is catalyzed by enzymes known as prenyltransferases. The Cannabis plant utilizes a membrane-bound prenyltransferase to catalyze the addition of the prenyl moiety to olivetolic acid to form CBGa.

[0594] It has been found, as described herein, that olivetolic acid and GPP can be taken as substrates for the PT72, PT273, and PT296 enzymes, which may thus advantageously be used in phytocannabionoid synthesis. As described herein, PT72, PT273, or PT296 may be used to transform a host cell, for use in prenylating polyketides in the pathway to phytocannabinoid synthesis.

[0595] In one aspect, there is a method described of producing a phytocannabinoid or phytocannabinoid analogue, comprising: utilizing PT72, PT273, or PT296, a recombinant prenyltransferase, to react a polyketide with a GPP to produce a phytocannabinoid or phytocannabinoid analogue.

[0596] In one aspect there is described a method of producing cannabigorcinic acid (CBGOa), comprising: providing a host cell which produces orsellinic acid; introducing a polynucleotide encoding prenyltransferase PT72, PT273, or PT296 polypeptide into said host cell, culturing the host cell under conditions sufficient for PT72, PT273, or PT296 polypeptide production in effective amounts to react with geranyl phyrophosphate to produce CBGOa.

[0597] In one aspect there is described a method of producing cannabigorcinic acid (CBGOa), comprising: culturing a host cell which produces orsellinic acid and comprises a polynucleotide encoding prenyltransferase PT72, PT273, or PT296 polypeptide under conditions sufficient for PTase polypeptide production.

[0598] Non limiting examples of phytocannabinoids that can be prepared according to the described methods include tetrahydrocannabinol (THC), cannabidiol (CBD), cannabinol (CBN), cannabigerol (CBG), cannabichromene (CBC), cannabicyclol (CBL), cannabivarin (CBV), tetrahydrocannabivarin (THCV), cannabidivarin (CBDV), cannabichromevarin (CBCV), cannabigerovarin (CBGV), and cannabigerol monomethyl ether (CBGM).

[0599] FIG. 39 depicts a general scheme for the use of any one of PT72, PT273, and PT296, as described herein, to attach a prenyl moiety to aromatic polyketides to produce prenylated polyketides.

[0600] FIG. 40 depicts examples of specific aromatic polyketides used in the pathway to the production of phytocannabinoids. Further, FIG. 3 is referenced here, depicting structures of phytocannabinoids produced from the C—C bond formation between a polyketide precursor and geranyl pyrophosphate.

[0601] In some example, the cannabinoid or phytocannabinoid may have one or more carboxylic acid functional groups. Non limiting examples of such cannabinoids or phytocannabinoids include tetrahydrocannabinolic acid (THCA), cannabidiolic acid (CBDA), and cannabichromenic acid (CBCA).

[0602] In some example, the cannabinoid or phytocannabinoid may lack carboxylic acid functional groups. Non limiting examples of such cannabinoids or phytocannabinoids include THC, CBD, CBG, CBC, and CBN.

[0603] In some examples of the method described herein, the phytocannabinoid produced is cannabigerol (CBG), cannabigerolic acid (CBGa), cannabigerovarin (CBGv), cannabigerovarinic acid (CBGva), cannabigerocin (CBGo), or cannabigerocinic acid (CBGoa).

[0604] In some examples of the method described herein, the polyketide is olivetol, olivetolic acid, divarin, divarinic acid, orcinol, or orsellinic acid.

[0605] In some example of the method herein, when the polyketide is olivetol the phytocannabinoid formed is cannabigerol (CBG), when the polyketide is olivetolic acid then the phytocannabinoid is cannabigerolic acid (CBGa), when the polyketide is divarin then the phytocannabinoid is cannabigerovarin (CBGv), when the polyketide is divarinic acid then the phytocannabinoid is cannabigerovarinic acid (CBGva), when the polyketide is orcinol then the phytocannabinoid is cannabigerocin (CBGo), and when the polyketide is orsellinic acid then the phytocannabinoid is cannabigerocinic acid (CBGoa).

[0606] A list of polyketides, prenyl donors and resulting prenylated polyketides which may be used or produced according to the methods described is provided in Table 1 above. The following terms are used: DMAPP for dimethylallyl diphosphate; GPP for geranyl diphosphate; FPP for farnesyl diphosphate; NPP for neryl diphosphate; and IPP for isopentenyl diphosphate.

[0607] As provided above in Table 2, there are numerous options for host cell organisms which may be used in one or more of the methods described herein

[0608] Method of the invention are conveniently practiced by providing the compounds and/or compositions used in such method in the form of a kit. Such kit preferably contains the composition. Such a kit preferably contains instructions for the use thereof.

### EXAMPLES—PART 5

[0609] To gain a better understanding of the invention described herein, the following examples are set forth. It should be understood that these examples are for illustrative purposes only. Therefore, they should not limit the scope of this invention in anyway.

### Example 15

[0610] Production of Phytocannabinoids in Yeast with Prenyltransferases from Stachybotrys.

[0611] Introduction. Phytocannabinoids are naturally produced in Cannabis sativa, other plants, and some fungi. Over 105 phytocannabinoids are known to be biosynthesized in C. sativa, or result from thermal or other decomposition from phytocannabinoids biosynthesized in C. sativa. While the C. sativa plant is also a valuable source of grain, fiber, and other material, growing C. sativa for phytocannabinoid production, particularly indoors, is costly in terms of energy and labour. Subsequent extraction, purification, and fractionation of phytocannabinoids from the C. sativa plant is also labour and energy intensive.

[0612] Phytocannabinoids are pharmacologically active molecules that contribute to the medical and psychotropic effects of C. sativa. Biosynthesis in the C. sativa plant scales similarly to other agricultural projects. As with other agricultural projects, large scale production of phytocannabinoids by growing C. sativa requires a variety of inputs (e.g. nutrients, light, pest control, CO2, etc.). The inputs required for cultivating C. sativa must be provided. In addition, cultivation of C. sativa, where allowed, is currently subject to heavy regulation, taxes, and rigorous quality control where products prepared from the plant are for commercial use, further increasing costs. As a result, it may be economical to produce the phytocannabinoids in a robust and scalable, fermentable organism. Saccharomyces cerevisiae has been used to produce industrial scales of similar molecules.

[0613] The time, energy, and labour involved in growing C. sativa for phytocannabinoid production provides a motivation to produce transgenic cell lines for production of phytocannabinoids in yeast.

[0614] International patent publication WO2018/148848 (Mookerjee et al.,), which is herein incorporated by reference, describes one such method for phytocannabinoid production in a transgenic yeast cell line.

[0615] The production of phytocannabinoids in genetically modified strains of Saccharomyces cerevisiae that have been transformed with genes coding for a prenyltransferase (PT72, PT273 or PT296) from Stachybotrys is described. These prenyltransferases catalyze the synthesis of cannabigerolic acid (CBGa) from olivetolic acid (OLA) and geranyl pyrophosphate (GPP). In C. sativa, a prenyltransferase catalyzes the synthesis of CBGa from olivetolic acid and GPP; however, the C. sativa prenyltransferase functions poorly in S. cerevisiae (see, for example, U.S. Pat. No. 8,884,100). The C. sativa prenyltransferase has a native N-terminal chloroplast targeting tag which may complicate expression in fungal hosts. PT72, PT273 and PT296 do not possess this targeting tag and thus may provide a distinct advantage when expressed in S. cerevisiae. This may be useful in creating a consolidated phytocannabinoid producing strain of S. cerevisiae. The S. cerevisiae may also have one or more mutations or modification in genes and metabolic pathways that are involved in OLA and GPP production or consumption.

[0616] The modified S. cerevisiae strain may also express genes encoding for DiPKS, a hybrid Type1 FAS-Type 3 PKS from Dictyostelium discoideum (Ghosh et al., 2008) and Olivetolic acid cyclase (OAC) from C. sativa (Gagne et al., 2012). DiPKS allows for the direct production of methyl-Olivetol (meOL) from malonyl-coA, a native yeast metabolite. Certain mutants of DiPKS have been identified that lead to the direct production of olivetol (OL) from malonyl-coA (see WO2018/148848 (2018) to Mookerjee et al.). OAC has been demonstrated to assist in the production of olivetolic acid when a suitable Type 3 PKS is used.

[0617] The C. sativa pathway enzymes require hexanoic acid for the production of OLA. However, hexanoic acid is highly toxic to S. cerevisiae and greatly diminishes its growth phenotype. As a result, when using DiPKS and OAC rather than the C. sativa pathway enzymes, hexanoic acid need not be added to the growth media, which may result in increased growth of the S. cerevisiae cultures and greater production of olivetolic acid. The S. cerevisiae may have over-expression of native acetaldehyde dehydrogenase and expression of a modified version of an acetoacetyl-CoA carboxylase or other genes, the modifications resulting in lowered mitochondrial acetaldehyde catabolism. Lowering mitochondrial acetaldehyde catabolism by diverting the acetaldehyde into acetyl-CoA production increases malonyl-CoA available for synthesizing olivetolic acid.

[0618] FIG. 4 is referenced here as an outline of the native biosynthetic pathway for cannabinoid production in Cannabis sativa. As expression and functionality of the C. sativa pathway in S. cerevisiae is hindered by problems of toxic precursors and poor expression, this Example utilizes a different biosynthetic route for cannabinoid production to overcome one or more of the above-described detrimental issues. FIG. 5 is referenced here as an outline of the pathway of cannabinoid biosynthesis as described herein. A four enzyme system is described. Dictyostelium polyketide synthase (DiPKS) (1), from D. discoideum and olivetolic acid cyclase (OAC) (2) from C, sativa are used to produce olivetolic acid directly from glucose, via acetyl CoA and malonyl CoA. Geranyl pyrophosphate (GPP) from the yeast terpenoid pathway and olivetolic acid (OLA) are subsequently converted to Cannabigerolic acid using a prenyltransferase (3) which in this example is: PT72, PT273, or PT296. Cannabigerolic acid is then further cyclized to produce THCa or CBDa using C. sativa THCa synthase (5) or CBDa synthase (4) enzymes, respectively.

[0619] The prenyltransferases referenced herein as “PT72”, “PT273”, or “PT296”, are previously uncharacterized integral membrane proteins that are derived from Stachybotrys bisbyi (PT72), Stachybotrys chlorohalonata (PT273) and Stachybotrys chartarum (PT296). These proteins are loosely related to PT104, a prenyltransferase from Rhododendron dauricum that had been previously reported to catalyze CBGA biosynthesis, as described in Applicant's own co-pending U.S. Provisional Patent Application No. 62,851,400, which is herein incorporated by reference. Sequence identity between PT72, PT273, PT296, PT104 as well two CBGA prenyltransferases reported from C. sativa (PT85) described in U.S. Pat. No. 8,884,100 and PT254 (Luo et al, 2019) are shown below in Table 51. Note that PT104 is a grifolic acid synthase, an integral membrane protein from Rhododendron dauricum, that has been characterized to convert orsellinic acid and farnesyl pyrophosphate (FPP) to grifolic acid (Saeki et al., 2018).

TABLE 51
Sequence Identity Between PT72, PT273,
PT296 and Other CBGa Prenyltransferases

| | % Identity | % Identity | % Identity |
|---|---|---|---|
| Enzyme | to PT72 | to PT273 | to PT296 |
| PT72 | 100 | 75.5 | 74.5 |
| PT273 | 75.5 | 100 | 97.8 |
| PT296 | 74.5 | 97.8 | 100 |
| PT85 | 20.4 | NA | NA |
| (U.S. Pat. No. 8,884,100) | | | |
| PT104 | 43.7 | 29.7 | 26.1 |
| PT254 | 25.5 | NA | NA |
| (see Luo et al. 2019) | | | |

[0620] The in vivo production of CBGa in S. cerevisiae using PT72, PT273 and PT296 as prenyltransferases is described herein. The base strains used in this example have modifications which allow for GPP and olivetolic acid production. The modifications are codified below in Table 52. The modifications made to the base strain are named, and described with reference to a sequence (SEQ ID NO.), the integration region in the genome, and other details such as the genetic structure of the sequence.

TABLE 52
Modifications to Base Strains Used in this Example

| | | | Integration | | |
|---|---|---|---|---|---|
| | Modification | SEQ ID | Region/ | | Genetic Structure |
| # | name | NO. | Plasmid | Description | of Sequence |
| 1 | NpgA | SEQ ID | Flagfeldt Site | Phosphopantetheinyl Transferase | Site14Up::Tef1p: |
| | | NO. 441 | 14 integration | from Aspergillus niger. Accessory | NpgA:Prm9t:Site14Down |
| | | | | Protein for DiPKS (Kim et al., | |
| | | | | 2015) | |
| 2 | DiPKS-1 | SEQ ID | USER Site | Type 1 FAS fused to Type 3 PKS | XII-1up::Gal1p: |
| | | NO. 442 | XII-1 | from D. discoideum. Produces | DiPKSG1516R: |
| | | | integration | Olivetol from malonyl-coA | Prm9t::XII1-down |
| | | | (Jensen et al., | | |
| | | | 2013) | | |
| 3 | DiPKS-2 | SEQ ID | Wu site 1 | Type 1 FAS fused to Type 3 PKS | Wu1up::Gal1p: |
| | | NO. 443 | integration | from D. discoideum. Produces | DiPKSG1516R: |
| | | | | Olivetol from malonyl-coA | Prm9t::Wu1down |
| 4 | DiPKS-3 | SEQ ID | Wu site 3 | Type 1 FAS fused to Type 3 PKS | Wu3up::Gal1p: |
| | | NO. 444 | integration | from D. discoideum. Produces | DiPKSG1516R: |
| | | | | Olivetol from malonyl-coA | Prm9t::Wu3down |
| 5 | DiPKS-4 | SEQ ID | Wu site 6 | Type 1 FAS fused to Type 3 PKS | Wu6up::Gal1p: |
| | | NO. 445 | integration | from D. discoideum. Produces | DiPKSG1516R: |
| | | | | Olivetol from malonyl-coA | Prm9t::Wu6down |
| 6 | DiPKS-5 | SEQ ID | Wu site 18 | Type 1 FAS fused to Type 3 PKS | Wu18up::Gal1p: |
| | | NO. 446 | integration | from D. discoideum. Produces | DiPKSG1516R: |
| | | | | Olivetol from malonyl-coA | Prm9t::Wu18down |
| 7 | PDH | SEQ ID | Flagfeldt Site | Acetaldehyde dehydrogenase | 19Up::Tdh3p:Ald6: |
| | | NO. 447 | 19 integration | (ALD6) from S. cerevisiae and | Adh1::Tef1p:seACS1^{L641P}: |
| | | | | acetoacetyl coA synthase | Prm9t::19Down |
| | | | | (AscL641P) from Salmonella | |
| | | | | enterica. Will allow greater | |
| | | | | accumulation of acetyl-coA in the | |
| | | | | cell. (Shiba et al., 2007) | |
| 8 | Maf1 | SEQ ID | Flagfeldt Site | Maf1 is a regulator of tRNA | Site5Up::Tef1p:Maf1: |
| | | NO. 448 | 5 integration | biosynthesis. Overexpression in S. | Prm9t:Site5Down |
| | | | | cerevisiae has demonstrated | |
| | | | | higher monoterpene (GPP) yields. | |
| | | | | (Liu et al., 2013) | |
| 9 | Erg20K197E | SEQ ID | Chromosomal | Mutant of Erg20 protein that | Tpi1t:ERG20K197E: |
| | | NO. 449 | modification | diminishes FPP synthase activity | Cyc1t::Tef1p:KanMX:Tef1t |
| | | | | creating greater pool of GPP | |
| | | | | precursor. Negatively affects | |
| | | | | growth phenotype.(Oswald et al, | |
| | | | | 2007) | |
| 10 | Erg1p:UB14- | SEQ ID | Flagfeldt Site | Sterol responsive promoter | Site18Up::Erg1p: |
| | Erg20:deg | NO. 450 | 18 integration | controlling Erg20 protein activity. | UB14deg:ERG20: |
| | | | | Allows for regular FPP synthase | Adh1t:Site18down |
| | | | | activity and uninhibited growth | |
| | | | | phenotype until accumulation of | |
| | | | | sterols which leads to a | |
| | | | | suppression of expression of | |
| | | | | enzyme. (Liu et al., 2013) | |
| 11 | tHMGr-IDI | SEQ ID | USER Site X- | Overexpression of truncated | X3up::Tdh3p:tHMGR1: |
| | | NO. 451 | 3 integration | HMGr1 and IDI1 proteins that | Adh1t::Tef1p:IDI1: |
| | | | | have been previously identified to | Prm9t::X3down |
| | | | | be bottlenecks in the S. cerevisiae | |
| | | | | terpenoid pathway responsible for | |
| | | | | GPP production. (Ro et al., 2006) | |
| 12 | PGK1p: | SEQ ID | Chromosomal | Mutations in the native S. | Pgk1:ACC1^{S659A, S1157A}: |
| | ACC1^{S659A, S1157A} | NO. 452 | modification | cerevisiae acetyl-coA carboxylase | Acc1t |
| | | | | that removes post-translational | |
| | | | | modification based down- | |
| | | | | regulation. Leads to greater | |
| | | | | malonyl-coA pools. The promoter | |
| | | | | of Acc1 was also changed to a | |
| | | | | constitutive promoter for higher | |
| | | | | expression (Shi, 2014) | |
| 13 | OAC | SEQ ID | Flagfeldt Site | The Cannabis sativa Olivetolic | FgF16up::Gal1p:csOAC: |
| | | NO. 453 | 16 integration | acid cyclase (OAC) protein allows | Eno2t::FgF16down |
| | | | | the production of olivetolic acid | |
| | | | | from a polyketide precursor. | |

[0621] The function of PT104 in the known synthetic pathway to grifolic acid is outlined in FIG. 6. Grifolic acid is an intermediate in the production of daurichromenic acid, an anti-HIV small molecule. This enzyme was previously characterized to strictly prefer orsellinic acid as the polyketide precursor and farnesyl pyrophosphate as the preferred prenyl donor. However, as described herein, that olivetolic acid and GPP can also be taken as substrates for this enzyme, as described in Applicant's own co-pending U.S. Provisional Patent Application No. 62/851,400, which is herein incorporated by reference. This leads to advantages for the use of this enzyme in phytocannabionoid synthesis. PT104, which may also be referred to as d31RdPT1, is a grifolic acid synthase, an integral membrane protein from Rhododendron dauricum, that has been characterized to convert orsellinic acid and farnesyl pyrophosphate (FPP) to grifolic acid (Saeki et al., 2018).

[0622] FIG. 41 shows a schematic outline of involvement of PT72, PT273, or PT296 as the prenyltransferase involved in preparing cannabigorcinic acid (CBGa), starting from the reaction of acetyl CoA with malonyl CoA to form orsellinic acid with the involvement of polyketide synthase (PKS). The orsellinic acid, together with geranyl pyrophosphate may then form CBGa, catalyzed by prenyltransferase PT72, PT273 or PT296 as described herein.

[0623] This example describes, for the first time, the in vivo production of cannabigerorcinic acid (CBGOa) and CBGa in S. cerevisiae using any one of PT72, PT273 or PT296 as the prenyltransferase.

[0624] Table 53 provides information about the plasmids used in this Example.

TABLE 53
Plasmid Information

| # | Plasmid Name | Description | Selection | Backbone |
|---|---|---|---|---|
| 1 | PLAS384 | Gal1p:PT273Cyc1t | Uracil | pYES-URA |
| 2 | PLAS400 | Gal1p:mScarlett:Cyc1t | Uracil | pYES-URA |
| 3 | PLAS411 | Gal1p:PT72:Cyc1t | Uracil | pYES-URA |
| 4 | PLAS413 | Gal1p:PT254:Cyc1t | Uracil | pYES-URA |
| 5 | PLAS414 | Gal1p:PT296:Cyc1t | Uracil | pYES-URA |

[0625] Table 54 lists the strains used in this example, providing the features of the strains including background, plasmids if any, genotype, etc.

TABLE 54
Strains Used

| Strain # | Background | Plasmids | Genotype | Notes |
|---|---|---|---|---|
| HB42 | -URA, -LEU | None | Saccharomyces cerevisiae | Base strain |
| | | | CEN.PK2; ΔLEU2; ΔURA3; | |
| | | | Erg20K197E::KanMx | |
| HB144 | -URA, -LEU | None | Saccharomyces cerevisiae | Parent strain |
| | | | CEN.PK2; ΔLEU2; ΔURA3; | for orsellinic |
| | | | Erg20K197E::KanMx; ALD6; ASC1L641P; | acid, divarinic |
| | | | NPGA; MAF1; PGK1p:Acc1; tHMGR1; IDI | acid and |
| | | | | olivetolic acid |
| | | | | feeding assays |
| HB895 | -URA, -LEU | None | Saccharomyces cerevisiae | Parent strain |
| | | | CEN.PK2; ΔLEU2; ΔURA3; | for in vivo |
| | | | Erg20K197E::KanMx; ALD6; ASC1L641P; | CBGA |
| | | | NPGA; MAF1; PGK1p:Acc1; tHMGR1; IDI; | production |
| | | | DiPKS_G1516R X 5; ACC1_S659A_S1157A; | assay with |
| | | | UB14p:ERG20; OAC; | inducible |
| | | | | prenyltransferases |
| HB977 | -URA, -LEU | PLAS400 | Saccharomyces cerevisiae | Expresses a |
| | | | CEN.PK2; ΔLEU2; ΔURA3; | non-cata lytic |
| | | | Erg20K197E::KanMx; ALD6; ASC1L641P; | mScarlett, |
| | | | NPGA; MAF1; PGK1p:Acc1; tHMGR1; IDI; | negative |
| | | | DiPKS_G1516R X 5; ACC1_S659A_S1157A; | control |
| | | | UB14p:ERG20; OAC; Galp:mScarlett | |
| HB1648 | -URA, -LEU | PLAS384 | Saccharomyces cerevisiae | Produces |
| | | | CEN.PK2; ΔLEU2; ΔURA3; | CBGA when |
| | | | Erg20K197E::KanMx; ALD6; ASC1L641P; | fed olivetolic |
| | | | NPGA; MAF1; PGK1p:Acc1; tHMGR1; IDI; | acid |
| | | | Galp:PT273 | |
| HB1649 | -URA, -LEU | PLAS411 | Saccharomyces cerevisiae | Produces |
| | | | CEN.PK2; ΔLEU2; ΔURA3; | CBGA when |
| | | | Erg20K197E::KanMx; ALD6; ASC1L641P; | fed olivetolic |
| | | | NPGA; MAF1; PGK1p:Acc1; tHMGR1; IDI; | acid |
| | | | DiPKS_G1516R X 5; ACC1_S659A_S1157A; | |
| | | | UB14p:ERG20; PT72 | |
| HB1650 | -URA, -LEU | PLAS400 | Saccharomyces cerevisiae | Negative for |
| | | | CEN.PK2; ΔLEU2; ΔURA3; | orsellinic acid, |
| | | | Erg20K197E::KanMx; ALD6; ASC1L641P; | divarinic acid |
| | | | NPGA; MAF1; PGK1p:Acc1; tHMGR1; IDI; | and olivetolic |
| | | | Galp:mScarlett | acid feeding |
| | | | | assays |
| HB1654 | -URA, -LEU | PLAS413 | Saccharomyces cerevisiae | Produces |
| | | | CEN.PK2; ΔLEU2; ΔURA3; | CBGa when |
| | | | Erg20K197E::KanMx; ALD6; ASC1L641P; | induced with |
| | | | NPGA; MAF1; PGK1p:Acc1; tHMGR1; IDI; | galactose. |
| | | | Galp:PT254 | Positive |
| | | | | control. |
| HB1665 | -URA, -LEU | PLAS414 | Saccharomyces cerevisiae | Produces |
| | | | CEN.PK2; ΔLEU2; ΔURA3; | CBGa when |
| | | | Erg20K197E::KanMx; ALD6; ASC1L641P; | induced with |
| | | | NPGA; MAF1; PGK1p:Acc1; tHMGR1; IDI; | galactose |
| | | | DiPKS_G1516R X 5; ACC1_S659A_S1157A; | |
| | | | UB14p:ERG20; OAC; Galp:PT296 | |
| HB1667 | -URA, -LEU | PLAS413 | Saccharomyces cerevisiae | Produces |
| | | | CEN.PK2; ΔLEU2; ΔURA3; | CBGa when |
| | | | Erg20K197E::KanMx; ALD6; ASC1L641P; | induced with |
| | | | NPGA; MAF1; PGK1p:Acc1; tHMGR1; IDI; | galactose. |
| | | | DiPKS_G1516R X 5; ACC1_S659A_S1157A; | Positive |
| | | | UB14p:ERG20; OAC; Galp:PT254 | control. |

[0626] Materials and Methods:

[0627] Genetic Manipulations:

[0628] HB42 was used as a base strain to develop all other strains. All DNA was transformed into strains using the Gietz et al., (2014) transformation protocol. Plas 36 was used for the CRISPR-based genetic modifications described in this experiment (Ryan et al., 2016).

[0629] The genome of HB42 was iteratively targeted by gRNA's and Cas9 expressed from PLAS36 to make genomic modifications in the order shown in Table 55.

TABLE 55
Genomic Modifications to Base Strain BH42

| Order | Genomic Region | Modification |
|---|---|---|
| 1 | Flagfeldt Site 19 integration | PDH |
| 2 | Flagfeldt Site 14 integration | NpgA |
| 3 | Flagfeldt Site 5 integration | Maf1 |
| 4 | Chromosomal Modification | PGK1p:ACC1^{S659A, S1157A} |
| 5 | USER Site X-3 integration | tHMGR-IDI1 |
| 6 | USER Site XII-2 integration | DiPKS-1 |
| 7 | Flagfeldt Site 18 integration | Erg1p:UB14-Erg20:deg |
| 8 | Wu site 1 integration | DiPKS-2 |
| 9 | Wu site 3 integration | DiPKS-3 |
| 10 | Wu site 6 integration | DiPKS-4 |
| 11 | Wu site 18 integration | DiPKS-5 |
| 12 | Flagfeldt site 16 integration | OAC |

[0630] Strain Growth and Media. HB1648, HB1649, HB1650 and HB1654 were grown in yeast minimal media with a composition of 1.7 g/L YNB without ammonium sulfate+1.96 g/L URA dropout amino acid supplements+1.5 g/L magnesium L-glutamate) with 2% w/v galactose, 2% w/v raffinose, 200 μg/l geneticin, and 200 ug/L ampicillin (Sigma-Aldrich Canada)+100 mg/L Orsellinic acid (Sigma-Aldrich Canada) for 96 hours. This allows the strains to produce CBGOa if the appropriate prenyltransferase is present. HB1650 expressed a non-catalytic mScarlett protein under these conditions and serves as a negative control.

[0631] In another embodiment HB1648, HB1649, HB1650 and HB1654 were grown in yeast minimal media with a composition of 1.7 g/L YNB without ammonium sulfate+1.96 g/L URA dropout amino acid supplements+1.5 g/L magnesium L-glutamate) with 2% w/v galactose, 2% w/v raffinose, 200 μg/l geneticin, and 200 ug/L ampicillin (Sigma-Aldrich Canada)+100 mg/L Divarinic acid (Sigma-Aldrich Canada) for 96 hours. This allows the strains to produce CBGVa if the appropriate prenyltransferase is present. HB1650 expressed a non-catalytic mScarlett protein under these conditions and serves as a negative control.

[0632] In another embodiment HB1648, HB1649, HB1650 and HB1654 were grown in yeast minimal media with a composition of 1.7 g/L YNB without ammonium sulfate+1.96 g/L URA dropout amino acid supplements+1.5 g/L magnesium L-glutamate) with 2% w/v galactose, 2% w/v raffinose, 200 μg/l geneticin, and 200 ug/L ampicillin+100 mg/L (Sigma-Aldrich Canada)+100 mg/L Olivetolic acid (Sigma-Aldrich Canada) for 96 hours. This allows the strains to produce CBGa if the appropriate prenyltransferase is present. HB1650 expressed a non-catalytic mScarlett protein under these conditions and serves as a negative control.

[0633] In another embodiment HB1665, HB997, and HB1667 were grown in yeast minimal media with a composition of 1.7 g/L YNB without ammonium sulfate+1.96 g/L URA dropout amino acid supplements+1.5 g/L magnesium L-glutamate) with 2% w/v galactose, 2% w/v raffinose, 200 μg/l geneticin, and 200 ug/L ampicillin+100 mg/L (Sigma-Aldrich Canada). HB1665, HB997 and HB1667 will produce olivetolic acid upon induction with galactose. CBGA will also be produced if the appropriate prenyltransferase is present.

[0634] Experimental Conditions. 3 single colony replicates of strains were tested in this example. All strains were grown in 1 ml media for 96 hours in 96-well deepwell plates. The deepwell plates were incubated at 30° C. and shaken at 950 rpm for 96 hrs.

[0635] Metabolite extraction was performed by adding 100 μl of 100% acetonitrile to 100 μl of culture in a new 96-well deepwell plate. An additional 200 μl of 75% acetonitrile was then added, followed by resuspension 10 times with a 200 ul pipette. The solutions were then centrifuged at 3750 rpm for 5 min. 200 μl of the soluble layer was removed and stored in a 96-well v-bottom microtiter plate. Samples were stored at −20° C. until analysis.

[0636] Samples were quantified using HPLC-MS analysis.

[0637] Quantification Protocol. The quantification of CBGa, CBGVa and CBGOa was performed using HPLC-MS on a Acquity UPLC-TQD MS. The chromatography and MS conditions are described below.

[0638] LC conditions. Column: ACQUITY UPLC 50×1 mm, 1.8 μm particle size. Column temperature: 45° C. Flow rate: 0.3 ml/min. Eluent A: Water 0.1% formic acid. Eluent B: Acetontrile 0.1% formic acid.

[0639] Table 56 shows the gradient over time.

TABLE 56
Gradient for LC

| Time (min) | % B |
|---|---|
| 0.00 | 10 |
| 0.90 | 90 |
| 1.30 | 90 |
| 1.31 | 10 |
| 2.00 | 10 |

[0640] ESI-MS conditions. Capillary: 4.0 kV. Source temperature: 150° C. Desolvation gas temperature: 250° C. Desolvation gas flow (nitrogen): 500 L/hr. Cone gas flow (nitrogen): 50 L/hr.

[0641] Table 57 lists detection parameters for ESI-MS.

TABLE 57
Detection Parameters for ESI-MS

| | CBGa |
|---|---|
| Retention time | 1.36 min |
| Transition (m/z) | 359.2 → 341.2 |
| Mode | ES−, MRM |
| Cone | 40 |
| Cone (V) | 25 |
| | CBGOa |
| Retention time | 1.22 min |
| Transition (m/z) | 303.2 → 285.1 |
| Mode | ES−, MRM |
| Cone | 45 |
| Cone (V) | 25 |
| | CBGVa |
| Retention time | 1.28 min |
| Transition (m/z) | 331.2 → 313.2 |
| Mode | ES−, MRM |
| Cone | 45 |
| Cone (V) | 25 |

[0642] Results:

[0643] The production of CBGOa, CBGVa and CGa in S. cerevisiae by resorcyclic acid feeding was observed.

[0644] Strains expressing PT273 (HB1648), PT72 (HB1649), PT254(HB1654) or mScarlett (HB1650) were grown in the presence of resorcylic acid to test prenyltransferase catalytic activity with different substrates. Media was supplemented to a final concentration of 100 mg/L with either orsellinic acid (Cl), divarinic acid (04) or olivetolic acid (06).

[0645] Table 58 shows the production of the corresponding C1, 04 and 06 cannabis in HB1648; HB1649, and HB1654 using resorcylic acid feeds, expressed in mg/L.

TABLE 58
Production of CBGOa, CBGVa and CBGa
by Novel Prenyltransferases

| | CBGOa | | CBGa |
|---|---|---|---|
| | (mg/L) | CBGVa(mg/L) | (mg/L) |
| HB1648 (PT273) | 0.70 | 1.14 | 15.67 |
| HB1649 (PT72) | 1.02 | 4.30 | 38.33 |
| HB1654 (PT254) | 0.00 | 8.40 | 15.33 |
| HB1650 (mScarlett) | 0.00 | 0.00 | 0.00 |

[0646] The production of CBGa was evaluated in vivo using PT296. PT296 (HB1665), PT254 (HB1667) and mScarlett (HB977) were expressed in an olivetolic acid producing strain of S. cerevisiae. Upon induction with galactose, CBGa production was observed in both HB1665 and HB1667. Values are shown in Table 59.

TABLE 59
In vivo production of CBGA with PT296

| | CBGa (mg/L) |
|---|---|
| HB1665 (PT296) | 6.60 |
| HB977 (mScarlett) | 0.00 |
| HB1667 (PT254) | 5.03 |

[0647] These data illustrate that PT72, PT273 and PT296 can act as effective prenyltransferases in the conversion of olivetolic acid to CBGa.

[0648] Part 6

[0649] PKS, NpgA, OAC and Mutants Thereof in the Production of Polyketides and Phytocannabinoids

[0650] The present disclosure relates generally to methods for production of polyketides and phytocannabinoids therefrom in a host cell, utilizing PKS, NpgA, OAC and mutants thereof.

[0651] Overview

[0652] It is an object of the present disclosure to obviate or mitigate at least one disadvantage of previous approaches to producing polyketides in a host cell, and of previous approaches to producing polyketides.

[0653] There is described herein a method of producing polyketides, the method comprising: providing a host cell comprising a polyketide synthase polynucleotide coding for a FaPKS polyketide synthase enzyme from Dictyostelium fasciculatum, wherein: the polyketide synthase enzyme is for producing at least one species of polyketide from malonyl-CoA, the polyketide according to formula 6-I:

[chemical structure]

[0654] wherein, on formula 6-I, R1 is an alkyl group with a chain length of 1, 2, 3, 4, 5 6, 7, 8, 16 or 18 carbons; and R2 comprises H, carboxyl or methyl; and propagating the host cell for providing a host cell culture.

[0655] Further, there is provided a method of producing polyketides, the method comprising: providing a host cell comprising a polyketide synthase polynucleotide coding for a PuPKS polyketide synthase enzyme from Dictyostelium purpureum, wherein: the polyketide synthase enzyme is for producing at least one species of polyketide from malonyl-CoA, the polyketide according to formula 6-II:

[chemical structure]

[0656] wherein, on formula 6-II, R1 is an alkyl group with a chain length of 1, 2, 3, 4, 5 6, 7, 8, 16 or 18 carbons; and R2 comprises H; wherein the PuPKS polyketide synthase enzyme has a primary structure with between 80% and 100% amino acid residue sequence homology with a protein coded for by a reading frame defined by bases 3486 to 12497 of SEQ ID NO:476, with a charged amino acid residue at amino acid residue position 1452 in place of a glycine residue at position 1452 for mitigating methylation of the at least one species of polyketide; and propagating the host cell for providing a host cell culture.

[0657] Additionally, a method of producing polyketides is described, the method comprising: providing a host cell comprising a polyketide synthase polynucleotide coding for at least two copies of a DiPKS polyketide synthase enzyme from Dictyostelium discoideum, wherein: the polyketide synthase enzyme is for producing at least one species of polyketide from malonyl-CoA, the polyketide according to formula 6-III:

[chemical structure]

[0658] wherein, on formula 6-III, R1 is an alkyl group with a chain length of 1, 2, 3, 4, 5 6, 7, 8, 16 or 18 carbons; and R2 comprises H or carboxyl; and

[0659] wherein the DiPKS polyketide synthase enzyme has a primary structure with between 80% and 100% amino acid residue sequence homology with a protein coded for by a reading frame defined by bases selected from the group consisting of bases 849 to 10292 of SEQ ID NO: 477, bases 717 to 10160 of SEQ ID NO:478, bases 795 to 10238 of SEQ ID NO:479, bases 794 to 10237 of SEQ ID NO:480, bases 1172 to 10615 of SEQ ID NO: 481, with a charged amino acid residue at amino acid residue position 1516 in place of a glycine residue at position 1516 for mitigating methylation of the at least one species of polyketide; and propagating the host cell for providing a host cell culture.

[0660] Host cells and polynucleotides are described.

### Detailed Description of Part 6

[0661] Generally, the present disclosure provides methods and yeast cell lines for producing polyketides Cannabis sativa plant and polyketides with differing side chain lengths. The polyketides are produced in transgenic yeast. The methods and cell lines provided herein include application of genes for enzymes absent from the C. sativa plant. Application of genes other than the complete set of genes in the C. sativa plant that code for enzymes in the biosynthetic pathway resulting in polyketides may provide one or more benefits including biosynthesis of polyketides that are not ordinarily synthesized in C. sativa, biosynthesis of polyketides without input of hexanoic acid, which is toxic to Saccharomyces cerevisiae and other species of yeast, and improved yield.

[0662] Many of the 120 phytocannabinoids found in Cannabis sativa may be synthesized from polyketides, and it may be desirable to improve production of polyketides in host cells.

[0663] In C. sativa, a type 3 polyketide synthase (“PKS”) enzyme called olivetolic acid synthase (“csOAS”) catalyzes synthesis of olivetolic acid from hexanoyl-CoA and malonyl-CoA in the presence of olivetolic acid cyclase (“csOAC”). Both csOAS and csOAC have been previously characterised as part of the C. sativa phytocannabinoid biosynthesis pathway (Gagne et al., 2012). A prenyltransferase enzyme catalyzes synthesis of cannabigerolic acid (“CBGa”) from olivetolic acid and geranyl pyrophosphate (“GPP”).

[0664] PKS enzymes are present across all kingdoms. Dictyostelium discoideum is a species of slime mold that expresses a PKS called “DiPKS”. Wild type DiPKS is a fusion protein consisting of both a type I fatty acid synthase (“FAS”) and a PKS, and is referred to as a hybrid “FAS-PKS” protein. Wild-type DiPKS catalyzes synthesis of 4-methyl-5-pentylbenzene-1,3 diol (“MPBD”) from malonyl-CoA. The reaction has a 6:1 stoichiometric ratio of malonyl-CoA to MPBD.

[0665] A mutant form of DiPKS in which glycine 1516 is replaced by arginine (“DiPKS^{G1516R}”) disrupts a methylation moiety of DiPKS. DiPKS^{G1516R} does not synthesize MPBD. In the presence of malonyl-CoA from a glucose source, DiPKS^{G1516R} catalyzes synthesis of only olivetol, and not MPBD (Mookerjee et al., WO2018148848; Mookerjee et al., WO2018148849).

[0666] Polyketide synthase enzymes from other species were located in a basic local alignment search tool (“BLAST”) search. The BLAST search showed homology and conservation in the c-methyl transferase domains of PKS enzymes from three additional species: Dictyostelium fasciculatum, Dictyostelium purpureum and Polysphondylium pallidum. The PKS enzymes from D. fasciculatum (“FaPKS”), Dictyostelium purpureum (“PuPKS”), and Polysphondylium pallidum (“PaPKS”) showed between 45.23% and 61.65% overall amino acid sequence homology with DiPKS.

[0667] NpgA is a 4′-phosphopantethienyl transferase from Aspergillus nidulans. Expression of NpgA alongside a PKS provides the A. nidulans phosphopantetheinyl transferase for greater catalysis of loading the phosphopantetheine group onto the ACP domain of a PKS. NpgA supports catalysis by DiPKS and homologues of DiPKS, including FaPKS, PuPKS and PaPKS. NpgA also supports catalysis by DiPKS^{G1516R}, and by homologous mutants of FaPKS, PuPKS and PaPKS, respectively including FaPKS^{G1434R} PuPKS^{G1452R} and PaPKS^{G1429R}

[0668] The methods and cells lines provided herein may apply and include transgenic cells that have been transformed with nucleotide sequences coding for a PKS and for NpgA. The cells may have also have been transformed with a nucleotide sequence coding for csOAC.

[0669] Co-expression of DiPKS^{G1516R}, NpgA and csOAC in S. cerevisiae resulted in production of olivetolic acid in vivo from galactose. Increasing the copy number of DiPKS^{G1516R} increases production of olivetol in the absence of csOAC. In the presence of csOAC, increasing the copy number of DiPKS^{G1516R} increases production of olivetolic acid, and in the ratio of olivetolic acid to olivetol. Strains of S. cerevisiae with csOAC integrated into the genome shows less production of olivetolic acid compared with a strain that expresses csOAC from a plasmid. Plasmid-based expression is associated with a higher copy-number than a typical genome-integrated number of copies. The copy number of both DiPKS^{G1516R} and csOAC affects production of olivetolic acid in S. cerevisiae.

[0670] Co-expression of FaPKS with NpgA resulted in production of MPBD. Co-expression of FaPKS^{G1434R} and NpgA resulted in production of olivetol. Co-expression of FaPKS^{G1434R}, NpgA and csOAC resulted in production of olivetol and olivetolic acid.

[0671] Co-expression of PuPKS an NpgA did not result in production of MPBD, olivetol or olivetolic acid. Co-expression of PuPKS^{G1452R} and NpgA resulted in production of olivetol. Co-expression of PuPKS^{G1452R}, NpgA and csOAC also resulted in production of olivetol.

[0672] Co-expression of PaPKS or PaPKS^{G1429R} and NpgA did not result in production of MPBD, olivetol or olivetolic acid.

[0673] Use of DiPKS^{G1516R}, FaPKS^{G1434R} or PuPKS^{G1452R} may provide advantages over csOAS for expression in S. cerevisiae to catalyze synthesis of olivetolic acid, or in the case of PuPKS^{G1452R} olivetol. csOAS catalyzes synthesis of olivetol from malonyl-CoA and hexanoyl-CoA. The reaction has a 3:1:1 stoichiometric ratio of malonyl-CoA to hexanoyl-CoA to olivetol. Olivetol synthesized during this reaction is carboxylated when the reaction is completed in the presence of csOAC, resulting in olivetolic acid. Hexanoic acid is toxic to S. cerevisiae. When applying csOAS and csOAC, hexanoyl-CoA is a necessary precursor for synthesis of olivetolic acid and the presence of hexanoic acid may inhibit proliferation of S. cerevisiae. When using DiPKS^{G1516R} or FaPKS^{G1434R} and csOAC to produce olivetolic acid rather than csOAS and csOAC, the hexanoic acid need not be added to the growth media. The absence of hexanoic acid in growth media may result in increased growth of the S. cerevisiae cultures and greater yield of olivetolic acid compared with S. cerevisiae cultures fed with csOAS.

[0674] The S. cerevisiae may have one or more mutations in Erg20, Maf1 or other genes for enzymes or other proteins that support metabolic pathways that deplete GPP, the one or more mutations being for increasing available malonyl-CoA, GPP or both. Alternatively to S. cerevisiae, other species of yeast, including Yarrowia lipolytica, Kluyveromyces marxianus, Kluyveromyces lactis, Rhodosporidium toruloides, Cryptococcus curvatus, Trichosporon pullulan and Lipomyces lipoferetc, may be applied.

[0675] Synthesis of olivetolic acid may be facilitated by increased levels of malonyl-CoA in the cytosol. The S. cerevisiae may have overexpression of native acetaldehyde dehydrogenase and expression of a mutant acetyl-CoA synthase or other gene, the mutations resulting in lowered mitochondrial acetaldehyde catabolism. Lowering mitochondrial acetaldehyde catabolism by diverting the acetaldehyde into acetyl-CoA production increases malonyl-CoA available for synthesizing olivetol. Acc1 is the native yeast malonyl CoA synthase. The S. cerevisiae may have over-expression of Acc1 or modification of Acc1 for increased activity and increased available malonyl-CoA. The S. cerevisiae may include modified expression of Maf1 or other regulators of tRNA biosynthesis. Overexpressing native Maf1 has been shown to reduce loss of isopentenyl pyrophosphate (“IPP”) to tRNA biosynthesis and thereby improve monoterpene yields in yeast. IPP is an intermediate in the mevalonate pathway.

[0676] In a first aspect, herein provided is a method and cell line for producing polyketides in recombinants organisms. The method applies, and the cell line includes, a host cell transformed with a polyketide synthase CDS and an olivetolic acid cyclase CDS. The polyketide synthase and the olivetolic acid cyclase catalyze synthesis of MPBP, olivetol or olivetolic acid from malonyl CoA. The olivetolic acid cyclase may include Cannabis sativa OAC. The polyketide synthase may include FaPKS, FaPKS^{G1434R}, PuPKS^{G1452R}. Multiple copy numbers of the polyketide synthase may be applied, including multiple copy numbers of DiPKS^{G1516R}. The host cell may include a yeast cell, a bacterial cell, a protest cell or a plant cell.

[0677] In a further aspect, here provided is a method of producing polyketides, the method comprising: providing a host cell comprising a polyketide synthase polynucleotide coding for a FaPKS polyketide synthase enzyme from Dictyostelium fasciculatum and propagating the host cell for providing a cell culture. The polyketide synthase enzyme is for producing at least one species of polyketide from malonyl-CoA, having a structure according to formula 6-I:

[chemical structure]

[0678] R1 is an alkyl group with a chain length of 1, 2, 3, 4, 5, 6, 7, 8, 16 or 18 carbons; and R2 comprises H, carboxyl or methyl.

[0679] In some embodiments, the polyketide synthase comprises a FaPKS polyketide synthase enzyme with a charged amino acid residue at amino acid residue position 1434 in place of a glycine residue at position 1434 for mitigating methylation of the at least one species of polyketide, and R2 comprises H. In some embodiments, the FaPKS polyketide synthase enzyme comprises a FaPKS^{G1434R} polyketide synthase enzyme with a primary structure with between 80% and 100% amino acid residue sequence homology with a protein coded for by a reading frame defined by bases 3486 to 12716 of SEQ ID NO:474. In some embodiments, the host cell further comprises a cyclase polynucleotide coding for an olivetolic acid cyclase enzyme olivetolic acid cyclase enzyme, and R2 comprises H or carboxyl. In some embodiments, the olivetolic acid cyclase enzyme comprises csOAC from C. sativa. In some embodiments, the cyclase polynucleotide comprises a coding sequence for csOAC with a primary structure having between 80% and 100% amino acid residue sequence identity with a protein coded for by a reading frame defined by bases 842 to 1150 of SEQ ID NO:464. In some embodiments, the cyclase polynucleotide has between 80% and 100% base sequence identity with bases 842 to 1150 of SEQ ID NO: 464.

[0680] In a further aspect, here provided is a method of producing polyketides, the method comprising: providing a host cell comprising a polyketide synthase polynucleotide coding for a PuPKS polyketide synthase enzyme from Dictyostelium purpureum and propagating the host cell for providing a host cell culture. The polyketide synthase enzyme is for producing at least one species of polyketide from malonyl-CoA, the polyketide having a structure according to formula 6-II:

[chemical structure]

[0681] R1 is an alkyl group with a chain length of 1, 2, 3, 4, 5, 6, 7, 8, 16 or 18 carbons; and R2 comprises H. The PuPKS polyketide synthase enzyme has a primary structure with between 80% and 100% amino acid residue sequence homology with a protein coded for by a reading frame defined by bases 3486 to 12497 of SEQ ID NO:476, with a charged amino acid residue at amino acid residue position 1452 in place of a glycine residue at position 1452 for mitigating methylation of the at least one species of polyketide.

[0682] In some embodiments, the polyketide synthase comprises a PuPKS^{G1452R} polyketide synthase enzyme, modified relative to PuPKS found from D. discoideum. In some embodiments, the at least one polyketide comprises olivetol and R1 is a pentyl group. In some embodiments, the host cell further comprises a cyclase polynucleotide coding for an olivetolic acid cyclase enzyme olivetolic acid cyclase enzyme. In some embodiments, the olivetolic acid cyclase enzyme comprises csOAC from C. sativa. In some embodiments, the cyclase polynucleotide comprises a coding sequence for csOAC with a primary structure having between 80% and 100% amino acid residue sequence identity with a protein coded for by a reading frame defined by bases 842 to 1150 of SEQ ID NO: 464. In some embodiments, the cyclase polynucleotide has between 80% and 100% base sequence identity with bases 842 to 1150 of SEQ ID NO: 464.

[0683] In a further aspect, here provided is a method of producing polyketides, the method comprising: providing a host cell comprising a polyketide synthase polynucleotide coding for at least two copies of a DiPKS polyketide synthase enzyme from Dictyostelium discoideum and propagating the host cell for providing a host cell culture. The polyketide synthase enzyme is for producing at least one species of polyketide from malonyl-CoA, the polyketide having a structure according to formula 6-III:

[chemical structure]

[0684] R1 is an alkyl group with a chain length of 1, 2, 3, 4, 5, 6, 7, 8, 16 or 18 carbons; and R2 comprises H or carboxyl. The DiPKS polyketide synthase enzyme has a primary structure with between 80% and 100% amino acid residue sequence homology with a protein coded for by a reading frame defined by bases selected from the group consisting of bases 849 to 10292 of SEQ ID NO: 477, bases 717 to 10160 of SEQ ID NO: 478, bases 795 to 10238 of SEQ ID NO: 479, bases 794 to 10237 of SEQ ID NO: 480, bases 1172 to 10615 of SEQ ID NO: 481, with a charged amino acid residue at amino acid residue position 1516 in place of a glycine residue at position 1516 for mitigating methylation of the at least one species of polyketide.

[0685] In some embodiments, the polyketide synthase comprises a DiPKS^{G1516R} polyketide synthase enzyme, modified relative to DiPKS found from D. discoideum. In some embodiments, the host cell further comprises a cyclase polynucleotide coding for an olivetolic acid cyclase enzyme olivetolic acid cyclase enzyme and wherein the at least one polyketide further comprises a polyketide in which R2 comprises a carboxyl group. In some embodiments, the olivetolic acid cyclase enzyme comprises csOAC from C. sativa. In some embodiments, the cyclase polynucleotide comprises a coding sequence for csOAC with a primary structure having between 80% and 100% amino acid residue sequence identity with a protein coded for by a reading frame defined by bases 842 to 1150 of SEQ ID NO: 464. In some embodiments, the cyclase polynucleotide has between 80% and 100% base sequence identity with bases 842 to 1150 of SEQ ID NO: 464.

[0686] In some embodiments, the host cell comprises a phosphopantetheinyl transferase polynucleotide coding for a phosphopantetheinyl transferase enzyme for increasing the activity of the polyketide synthase enzyme. In some embodiments, the phosphopantetheinyl transferase comprises NpgA phosphopantetheinyl transferase enzyme from A. nidulans. In some embodiments, the host cell comprises a genetic modification to increase available geranylpyrophosphate. In some embodiments, the genetic modification comprises a partial inactivation of the farnesyl synthase functionality of the Erg20 enzyme. In some embodiments, the host cell comprises an Erg20^{K197E} polynucleotide including a coding sequence for Erg20^{K197E}In some embodiments, the host cell comprises a genetic modification to increase available malonyl-CoA. In some embodiments, the host cell comprises a yeast cell and the genetic modification comprises increased expression of Maf1. In some embodiments, the genetic modification comprises a modification for increasing cytosolic expression of an aldehyde dehydrogenase and an acetyl-CoA synthase. In some embodiments, the host cell comprises a yeast cell and the genetic modification comprises a modification for expressing for Acs^{L641P} from S. enterica and Ald6 from S. cerevisiae. In some embodiments, the genetic modification comprises a modification for increasing malonyl-CoA synthase activity. In some embodiments, the host cell comprises a yeast cell and the genetic modification comprises a modification for expressing Acc1^{S659A; S1157A} from S. cerevisiae. In some embodiments, the host cell comprises a yeast cell comprising an Acc1 polynucleotide including the coding sequence for Acc1 from S. cerevisiae under regulation of a constitutive promoter. In some embodiments, the constitutive promoter comprises a PGK1 promoter from S. cerevisiae.

[0687] The host cell can be a bacterial cell, a fungal cell, a protist cell, or a plant cell, such as any of the exemplary cell types noted herein in Table 2. Exemplary host cell types include S. cerevisiae, E. coli, Yarrowia lipolytica, and Komagataella phaffii.

[0688] In some embodiments, the method includes extracting the at least one species of polyketide from the host cell culture.

[0689] In a further aspect, here provided is a host cell for producing polyketides, the host cell comprising: a first polynucleotide coding for a polyketide synthase enzyme; and a second polynucleotide coding for an olivetolic acid cyclase enzyme.

[0690] In some embodiments, the host cell includes the features of one or more of the host cell, the polyketide synthase polynucleotide, the cyclase polynucleotide, the phosphopantetheinyl transferase polynucleotide, the Erg20^{K197E} polynucleotide, the genetic modification to increase available malonyl-CoA or the genetic modification to increase available geranylpyrophosphate.

[0691] In a further aspect, herein provided is a method of transforming a host cell for production of polyketides, the method comprising introducing a first polynucleotide coding for a polyketide synthase enzyme into the host cell line; and introducing a second polynucleotide coding for an olivetolic acid cyclase enzyme into the host cell.

[0692] In some embodiments, the method includes the features of one or more of the host cell, the polyketide synthase polynucleotide, the cyclase polynucleotide, the phosphopantetheinyl transferase polynucleotide, the Erg20^{K197E} polynucleotide, the genetic modification to increase available malonyl-CoA or the genetic modification to increase available geranylpyrophosphate as described herein.

[0693] In a further aspect, herein provided is an FaPKS polyketide synthase enzyme with a charged amino acid residue at amino acid residue position 1434 in place of a glycine residue at position 1434.

[0694] In some embodiments, the FaPKS polyketide synthase enzyme has a primary structure with between 80% and 100% amino acid residue sequence homology with a protein coded for by a reading frame defined by bases 3486 to 12716 of SEQ ID NO:474.

[0695] In a further aspect, herein provided is an FaPKS polyketide synthase enzyme with a charged amino acid residue at amino acid residue position 1434 in place of a glycine residue at position 1434.

[0696] In some embodiments, the polynucleotide has between 80% and 100% nucleotide residue sequence homology with bases 3486 to 12716 of SEQ ID NO: 474.

[0697] In a further aspect, herein provided is a PuPKS polyketide synthase enzyme with a charged amino acid residue at amino acid residue position 1452 in place of a glycine residue at position 1452.

[0698] In some embodiments, the PuPKS polyketide synthase enzyme has a primary structure with between 80% and 100% amino acid residue sequence homology with a protein coded for by a reading frame defined by bases 3486 to 12497 of SEQ ID NO:476.

[0699] In a further aspect, herein provided is a polynucleotide coding for a PuPKS polyketide synthase enzyme with a charged amino acid residue at amino acid residue position 1452 in place of a glycine residue at position 1452.

[0700] In some embodiments, the polynucleotide has between 80% and 100% nucleotide residue sequence homology with bases 3486 to 12497 of SEQ ID NO: 476.

[0701] FIG. 28 is a schematic of biosynthesis of olivetolic acid and related compounds with different alkyl group chain lengths in C. sativa. FIG. 29 is a schematic of biosynthesis of CBGa from hexanoic acid, malonyl-CoA, and geranyl pyrophosphate in C. sativa. FIG. 30 is a schematic of biosynthesis of downstream phytocannabinoids in acid form CBGa C. sativa. FIG. 31 is a schematic of biosynthesis of MPBD by DiPKS. FIG. 32 is a schematic of functional domains in DiPKS, with mutations to a C-methyl transferase that for lowering methylation of olivetol. FIGS. 28 to 32 are describe in detail above.

[0702] Methods and yeast cells as provided herein for production of polyketides may apply and include S. cerevisiae transformed with a gene for csOAS from C. sativa.

[0703] DiPKS and Mutants

[0704] Conversion of malonyl-CoA and hexanoyl-CoA to olivetolic acid catalyzed by csOAS at Reaction 2 of FIG. 29 was identified as a metabolic bottleneck in the pathway of FIG. 29, as described in further detail above. FIG. 31 shows production of MPBD from malonyl-CoA as catalyzed by DiPKS.

[0705] DiPKS Homologues and Mutants

[0706] Polyketide synthase enzymes from other species were located in a basic local alignment search tool (“BLAST”) search. The BLAST search showed homology and conservation in the c-methyl transferase domains of PKS enzymes from three additional species: Dictyostelium fasciculatum, Dictyostelium purpureum and Polysphondylium pallidum. The PKS enzymes from D. fasciculatum (“FaPKS”), Dictyostelium purpureum (“PuPKS”), and Polysphondylium pallidum (“PaPKS”) showed overall amino acid sequence homology with DiPKS according to Table 60.

TABLE 60
DiPKS Homologues

| Organism | Name of PKs | % Similarity to DiPKS |
|---|---|---|
| Dictyostelium fasciculatum | FaPKS | 45.23% |
| Dictyostelium purpureum | PuPKS | 61.65% |
| Polysphondylium pallidum | PaPKS | 45.81% |

[0707] The primary amino acid sequences of FaPKS, PuPKS and PaPKS were aligned the amino acid with DiPKS to see if there were any conserved residues in the C-methyltransferase domain of the proteins. Molecular Evolutionary Genetic Analysis (“MEGA”) software and Muscle were used to create amino acid sequence alignments and determine the degree of conservation. As shown in Table 61A-610, the alignments showed that the C-methyltransferase domain was highly conserved, including a glycine residue believed to correspond to glycine 1516 in DiPKS.

TABLE 61A
Alignment between DiPKS, FaPKS, PuPKS and PaPKS

| Species | | | | | | | | * | | | | | | | | | | | |
|---|---|---|---|---|---|---|---|---|---|---|---|---|---|---|---|---|---|---|---|
| D. discoideum | S | E | M | V | L | E | S | I | R | P | I | V | R | E | — | — | — | — | — |
| D. fasciculatum | G | S | T | I | Q | K | A | I | G | N | I | V | T | K | S | D | Q | D | C |
| D. purpureum | A | S | L | V | L | E | S | I | K | P | I | V | R | E | — | — | — | — | — |
| P. pallidum | A | D | T | I | Q | H | A | I | T | S | K | L | S | E | — | — | — | — | — |

TABLE 61C
Alignment between DiPKS, FaPKS, PuPKS and PaPKS (con't)

| Species | | * | | | | | | | | | | | | | | | | | |
|---|---|---|---|---|---|---|---|---|---|---|---|---|---|---|---|---|---|---|---|
| D. discoideum | V | L | T | K | L | N | T | Y | L | S | T | L | N | S | N | G | G | S | G |
| D. fasciculatum | L | L | T | K | L | A | S | L | F | — | — | — | — | — | — | E | G | T | T |
| D. purpureum | V | L | E | K | L | N | K | F | L | — | — | — | — | — | — | S | I | N | S |
| P. pallidum | L | L | N | T | F | N | L | I | L | — | — | — | — | — | — | G | G | P | K |

TABLE 61D
Alignment between DiPKS, FaPKS, PuPKS and PaPKS (con't)

| Species | | | | | | | | | | * | | * | * | * | | * | | |
|---|---|---|---|---|---|---|---|---|---|---|---|---|---|---|---|---|---|---|
| D. discoideum | Y | — | — | — | N | I | I | I | E | Y | T | F | T | D | I | S | A | N |
| D. fasciculatum | Y | E | K | S | G | V | E | V | V | Y | T | F | T | D | I | S | A | S |
| D. purpureum | D | K | — | — | N | I | I | V | E | Y | N | F | T | D | I | S | S | S |
| P. pallidum | Q | — | — | — | R | I | E | I | E | Y | T | F | T | D | V | S | A | G |

[0708] This conserved domain alignment was further utilized to create mutants of FaPKS, PuPKS and PaPKS to mitigate activity at the c-methyltransferase domain. DiPKS^{G1516R} was used to identify the cognate residue corresponding to conserved glycine 1516 in DiPKS, which in DiPKS is critical for functionality of the C-met Domain. The corresponding residue in each of FaPKS, PuPKS and PaPKS was modified in each case to an arginine residue. Specifically, the residues corresponding to glycine 1516 in DiPKS were mutated to arginine in each of FaPKS, PuPKS and PaPKS, resulting in FaPKS^{G1434R} PuPKS^{G1452R} and PaPKS^{G1429R} The wild-type and mutant homologs of DiPKS were subsequently codon-optimized for S. cerevisiae expression using EMBOSS BACKTRANSSEQ (https: //www.ebi.ac.uk/Tools/st/emboss_backtranseq/) and synthesized by GenScript USA Inc. They were synthesized in the standard yeast expression vector pESC UR.

[0709] FIG. 32 is a schematic of the functional domains of PKS enzymes, including DiPKS, FaPKS, PuPKS and PaPKS. FIG. 32 shows functional domains similar to domains found in a fatty acid synthase, and in additional includes a methyltransferase domain and a PKS III domain, and is described in detail above. The “Type III” domain is a type 3 PKS. The KS, AT, DH, ER, KR, and ACP portions provide functions typically associated with a fatty acid synthase, speaking to DiPKS, FaPKS, PuPKS and PaPKS each being a FAS-PKS protein. The C-Met domain provides the catalytic activity for methylating olivetol at carbon 4, providing MPBD. The C-Met domain is crossed out in FIG. 32, schematically illustrating changes to DiPKS, FaPKS, PuPKS and PaPKS that inactivate the C-Met domain and mitigate or eliminate methylation functionality.

[0710] A mutant form of DiPKS in which glycine 1516 is replaced by arginine (“DiPKS^{G1516R}”) disrupts a methylation moiety of DiPKS. DiPKS^{G1516R} does not synthesize MPBD. In the presence of malonyl-CoA from a glucose or other sugar source, and in the absence of csOAC or another olivetolic acid cyclase or other polyketide cyclase, DiPKS^{G1516R} catalyzes synthesis of only olivetol, and not MPBD (Mookerjee et al., WO2018148848; Mookerjee et al. WO2018148849). Application of DiPKS^{G1516R} rather than csOAS facilitates production of polyketides without hexanoic acid supplementation. Since hexanoic acid is toxic to S. cerevisiae, eliminating a requirement for hexanoic acid in the biosynthetic pathway for polyketides may provide greater yields of polyketides than the yields of polyketides in a yeast cell expressing csOAS and Hex1.

[0711] Through the MEGA search of DiPKS, FaPKS, PuPKS and PaPKS and associated alignment as shown in FIG. 29, FaPKS^{G1434R}, PuPKS^{G1452R} and PaPKS^{G1429R} were each prepared.

[0712] Transforming and Growing Yeast Cells

[0713] Details of specific examples of methods carried out and yeast cells produced in accordance with this description are provided below as Examples 16, 17, and 18. Each of these three specific examples applied similar approaches to plasmid construction, transformation of yeast, quantification of strain growth, and quantification of intracellular metabolites. These common features across the three examples are described below, followed by results and other details relating to one or more of the examples.

[0714] As shown in Table 62, six strains of yeast were prepared. In the “Genotype” column, the integration-based modifications are listed in the order they were introduced into the genome. Base strain “HB42” is a uracil and leucine auxotroph CEN PK2 variant of S. cerevisiae. Modified base strain “HB144” was prepared from HB42 with several genetic modifications to increase the availability of biosynthetic precursors and to increase PKS activity. Additional details are in Table 63.

[0715] All subsequent strains were based on HB144. Strains HB259, HB309, HB310 and HB742 each included between one and five copy numbers of DiPKS^{G1516R}. Strain HB801 included five copy numbers of DiPKS^{G1516R} and csOAC. Strains HB865, HB866, HB867, HB868, HB869 and HB870 each included one of FaPKS, PuPKS, PaPKS, FaPKS^{G1434R} PuPKS^{G1452R} and PaPKS^{G1429R}. Strains HB873, HB874, HB875 and HB877 each included between one and five copy numbers of DiPKS^{G1516R} and each included csOAC. Strain HB1030 included csOAC integrated into HB144. Strain HB1113 included PuPKS^{G1452R} and csOAC. Strain HB1114 include FaPKS^{G1434R} and csOAC.

TABLE 62
Yeast Strains

| Strain | Plasmids | Genotype | Notes |
|---|---|---|---|
| HB42 | None | CEN.PK2 | Base Strain |
| | | ΔLEU2 | |
| | | ΔURA3 | |
| | | Erg20K197E::KanMx | |
| HB144 | None | (HB42) | Modified Base Strain |
| | | ALD6; ASC1^{L641P} | |
| | | NPGA | |
| | | MAF1 | |
| | | PGK1p: | |
| | | Acc1^{S659A; S1157A} | |
| | | tHMGR1; IDI | |
| HB259 | None | (HB144) | DiPKS^{G1516R} x 1 |
| | | DiPKS^{G1516R} | Produces Olivetol |
| | | UB14p:ERG20 | |
| HB309 | None | (HB259) | DiPKS^{G1516R} x 3 |
| | | DiPKS^{G1516R} | Produces Olivetol |
| | | DiPKS^{G1516R} | |
| HB310 | None | (HB309) | DiPKS^{G1516R} x 4 |
| | | DiPKS^{G1516R} | Produces Olivetol |
| HB742 | None | (HB310) | DiPKS^{G1516R} x 5 |
| | | DiPKS^{G1516R} | Produces Olivetol |
| HB801 | None | (HB742) | DiPKS^{G1516R} x 5 |
| | | Gal1p:csOAC | Produces Olivetolic Acid |
| HB865 | Plas-43 | HB144 | PaPKS |
| | | | No Production of MPBD, |
| | | | Olivetol or |
| | | | Olivetolic Acid |
| HB866 | Plas-46 | HB144 | PaPKS^{G1429R} |
| | | | No Production of MPBD, |
| | | | Olivetol or |
| | | | Olivetolic Acid |
| HB867 | Plas-47 | HB144 | FaPKS |
| | | | Produces MPBD |
| HB868 | Plas-180 | HB144 | PuPKS^{G1452R} |
| | | | Produces Olivetol |
| HB869 | Plas-191 | HB144 | PuPKS |
| | | | No Production of MPBD, |
| | | | Olivetol or |
| | | | Olivetolic Acid |
| HB870 | Plas-249 | HB144 | FaPKS^{G1434R} |
| | | | Produces Olivetol |
| HB873 | Plas-48 | HB259 | DiPKS^{G1516R} x 1 |
| | | | Produces Olivetol and |
| | | | Olivetolic Acid |
| HB874 | Plas-48 | HB309 | DiPKS^{G1516R} x 3 |
| | | | Produces Olivetol and |
| | | | Olivetolic Acid |
| HB875 | Plas-48 | HB310 | DiPKS^{G1516R} x 4 |
| | | | Produces Olivetol and |
| | | | Olivetolic Acid |
| HB877 | Plas-48 | HB742 | DiPKS^{G1516R} x 5 |
| | | | Produces Olivetol and |
| | | | Olivetolic Acid |
| HB1030 | None | (HB144) | Modified Base Strain |
| | | Gal1p:csOAC | Includes csOAC |
| HB1113 | Plas-180 | HB1030 | PuPKS^{G1452R} |
| | | | Produces Olivetol |
| HB1114 | Pas-249 | HB1030 | FaPKS^{G1434R} |
| | | | Produces Olivetol and |
| | | | Olivetolic Acid |

[0716] Protein sequences and coding DNA sequences used to prepare the strains in Table 62 are provided below in Table 63 and full sequence listings are provided below.

TABLE 63
Protein and DNA Sequences used to Prepare the Yeast Strains

| SEQ ID NO | Description | Material | Length | Coding Sequence |
|---|---|---|---|---|
| 462 | csOAC | Protein | 102 | Entire sequence |
| 463 | PLAS48 | DNA | 6094 | 1 to 306 |
| 464 | Gal1p:csOAC:Eno2t | DNA | 2177 | 842 to 1150 |
| | expression/integration cassette | | | |
| 465 | DiPKS | Protein | 3147 | 1 to 3147 |
| 466 | DiPKS^{G1516R} | Protein | 3147 | 1 to 3147 |
| 467 | FaPKS | Protein | 3076 | 1 to 3076 |
| 468 | FaPKS^{G1434R} | Protein | 3076 | 1 to 3076 |
| 469 | PuPKS | Protein | 3003 | 1 to 3003 |
| 470 | PuPKS^{G1452R} | Protein | 3003 | 1 to 3003 |
| 471 | PaPKS | Protein | 3026 | 1 to 3026 |
| 472 | PaPKS^{G1429R} | Protein | 3026 | 1 to 3026 |
| 473 | pESC_Gal1p:FaPKS:Cyc1t | DNA | 16888 | 3486 to 12716 |
| 474 | pESC_Gal1p:FaPKS^{G1434R}:Cyc1t | DNA | 16888 | 3486 to 12716 |
| 475 | pESC_Gal1p:PuDiPKS:Cyc1t | DNA | 16669 | 3486 to 12497 |
| 476 | pESC_Gal1p:PuPKS^{G1452R}:Cyc1t | DNA | 16669 | 3486 to 12497 |
| 477 | pESC_Gal1p:PaPKS:Cyc1t | DNA | 16738 | 3486 to 12566 |
| 478 | pESC_Gal1p:PaPKS^{G1429R}:Cyc1t | DNA | 16738 | 3486 to 12566 |
| 479 | NpgA | DNA | 3564 | 1170 to 2201 |
| 480 | DiPKS-1 | DNA | 11114 | 849 to 10292 |
| 481 | DiPKS-2 | DNA | 10890 | 717 to 10160 |
| 481 | DiPKS-3 | DNA | 11300 | 795 to 10238 |
| 483 | DiPKS-4 | DNA | 11140 | 794 to 10237 |
| 484 | DiPKS-5 | DNA | 11637 | 1172 to 10615 |
| 485 | PDH | DNA | 7114 | Ald6: 1444 to 2949 |
| | | | | ACS: 3888 to 5843 |
| 486 | Maf1 | DNA | 3256 | 936 to 2123 |
| 487 | Erg20K197E | DNA | 4254 | 2683 to 3423 |
| 488 | Erg1p:UB14-Erg20:deg | DNA | 3503 | 1364 to 2701 |
| 489 | tHMGr-IDI1 | DNA | 4843 | tHMGR1: |
| | | | | 877 to 2385 |
| | | | | IDI1: 3209 to 4075 |
| 490 | PGK1p:ACC1^{S659A, S1157A} | DNA | 7673 | Pgk1p: 222 to 971 |
| | | | | Acc1^{S659A, S1157A}: |
| | | | | 972 to 7673 |
| 491 | PLAS36 | DNA | 8980 | Not applicable |

[0717] Genome Modification of S. cerevisiae

[0718] HB42 was used as a base strain to develop all other strains in this experiment. All DNA was transformed into strains using the transformation protocol described in Gietz et al. (2007). Plas-36 was used for the genetic modifications described in this experiment that apply clustered regularly interspaced short palindromic repeats (CRISPR).

[0719] The genome of HB42 was iteratively targeted by gRNA's and Cas9 expressed from PLAS36 to make the following genomic modifications in the order of the Table 64 below. Erg20^{K197E} was already included in HB42 and is marked as being order “0”. The strains resulting from the genomic integrations are listed in Table 62.

TABLE 64
Gene Integration in HB742

| Order | Modification | Integration | Description | Genetic Structure |
|---|---|---|---|---|
| 0 | Erg20^{K197E} | Chromosomal | Mutant of Erg20 protein that | Tpi1p:ERG20K197E: |
| | SEQ ID NO. 487 | modification | diminishes FPP synthase | Cyc1t::Tef1p:KanMX:Tef1t |
| | | | activity creating greater pool | |
| | | | of GPP precursor. | |
| | | | Negatively affects growth | |
| | | | phenotype. (Oswald et al., | |
| | | | 2007) | |
| 1 | PDH bypass | Flagfeldt Site | Acetaldehyde | 19Up::Tdh3p:Ald6: |
| | SEQ ID NO. 485 | 19 integration | dehydrogenase (ALD6) from | Adh1::Tef1p:seACS1^{L641P}: |
| | | | S. cerevisiae and | Prm9t::19Down |
| | | | acetoacetyl coA synthase | |
| | | | (AscL641P) from Salmonella | |
| | | | enterica. Will allow greater | |
| | | | accumulation of acetyl-coA | |
| | | | in the cell. (Shiba et al., | |
| | | | 2007) | |
| 2 | NpgA | Flagfeldt Site | Phosphopantetheinyl | Site14Up::Tef1p:NpgA: |
| | SEQ ID NO. 479 | 14 integration | Transferase from Aspergillus | Prm9t:Site14Down |
| | | | niger. Accessory Protein for | |
| | | | DiPKS (Kim et al., 2007) | |
| 3 | Maf1 | Flagfeldt Site 5 | Maf1 is a regulator of tRNA | Site5Up::Tef1p:Maf1: |
| | SEQ ID NO. 486 | integration | biosynthesis. | Prm9t:Site5Down |
| | | | Overexpression in S. | |
| | | | cerevisiae has demonstrated | |
| | | | higher monoterpene (GPP) | |
| | | | yields (Liu et al., 2013) | |
| 4 | PGK1p:ACC1^{S659A, S1157A} | Chromosomal | Mutations in the native S. | Pgk1:ACC1^{S659A, S1157A}: |
| | SEQ ID NO. 490 | Modification | cerevisiae acetyl-coA | Acc1t |
| | | | carboxylase that removes | |
| | | | post-translational | |
| | | | modification based down- | |
| | | | regulation. Leads to greater | |
| | | | malonyl-coA pools. The | |
| | | | promoter of Acc1 was also | |
| | | | changed to a constitutive | |
| | | | promoter for higher | |
| | | | expression. (Shi et al., 2014) | |
| 5 | tHMGR-IDI1 | USER Site X-3 | Overexpression of truncated | X3up::Tdh3p:tHMGR1: |
| | SEQ ID NO. 489 | integration | HMGr1 and IDI1 proteins | Adh1t::Tef1p:IDI1: |
| | | | that have been previously | Prm9t::X3down |
| | | | identified to be bottlenecks | |
| | | | in the S. cerevisiae | |
| | | | terpenoid pathway | |
| | | | responsible for GPP | |
| | | | production. (Ro et al., 2006) | |
| 6 | DiPKS^{G1516R}-1 | USER Site XII- | Type 1 FAS fused to Type 3 | XII-1up::Gal1p: |
| | SEQ ID NO. 480 | 1 integration | PKS from D. discoideum. | DiPKS^{G1516R}: |
| | | (Jensen et al., | Produces Olivetol from | Prm9t::XII1-down |
| | | no date) | malonyl-coA | |
| 7 | Erg1p:UB14- | Flagfeldt Site | Sterol responsive promoter | Site18Up::Erg1p: |
| | Erg20:deg | 18 integration | controlling Erg20 protein | UB14deg:ERG20: |
| | SEQ ID NO. 488 | | activity. Allows for regular | Adh1t:Site18down |
| | | | FPP synthase activity and | |
| | | | uninhibited growth | |
| | | | phenotype until | |
| | | | accumulation of sterols | |
| | | | which leads to a suppression | |
| | | | of expression of enzyme. | |
| | | | (Peng et al., 2018) | |
| 8 | DiPKS^{G1516R}-2 | Wu site 1 | Type 1 FAS fused to Type 3 | Wu1up::Gal1p: |
| | SEQ ID NO. 481 | integration | PKS from D. discoideum. | DiPKS^{G1516R}: |
| | | | Produces Olivetol from | Prm9t::Wu1down |
| | | | malonyl-coA | |
| 9 | DiPKS^{G1516R}-3 | Wu site 3 | Type 1 FAS fused to Type 3 | Wu3up::Gal1p: |
| | SEQ ID NO. 482 | integration | PKS from D. discoideum. | DiPKS^{G1516R}: |
| | | | Produces Olivetol from | Prm9t::Wu3down |
| | | | malonyl-coA | |
| 10 | DiPKS^{G1516R}-4 | Wu site 6 | Type 1 FAS fused to Type 3 | Wu6up::Gal1p: |
| | SEQ ID NO. 483 | integration | PKS from D. discoideum. | DiPKS^{G1516R}: |
| | | | Produces Olivetol from | Prm9t::Wu6down |
| | | | malonyl-coA | |
| 11 | DiPKS^{G1516R}-5 | Wu site 18 | Type 1 FAS fused to Type 3 | Wu18up::Gal1p: |
| | SEQ ID NO. 484 | integration | PKS from D. discoideum. | DiPKS^{G1516R}: |
| | | | Produces Olivetol from | Prm9t::Wu18down |
| | | | malonyl-coA | |
| 12 | csOAC | Flagfeldt Site | C. sativa Olivetolic acid | Site16Up::Gal1p: |
| | SEQ ID NO. 464 | 16 integration | cyclase | csOAC:Eno2t:Site16down |

[0720] To create HB1030, HB144 was modified with SEQ ID NO. 464 in a similar fashion to that applied to HB742 to create HB801.

[0721] The S. cerevisiae strains described herein may be prepared by stable transformation of plasmids, genome integration or other genome modification. Genome modification may be accomplished through homologous recombination, including by methods leveraging CRISPR.

[0722] Methods applying CRISPR were applied to delete DNA from the S. cerevisiae genome and introduce heterologous DNA into the S. cerevisiae genome, as described above in PART 4.

[0723] Integration site homology sequences for integration into the S. cerevisiae genome using CRISPR may be at Flagfeldt sites. A description of Flagfeldt sites is provided in Bai Flagfeldt, et al., (2009). Other integration sites may be applied as indicated in Table 64.

[0724] Increasing Availability of Biosynthetic Precursors

[0725] The biosynthetic pathways shown in FIG. 42 each require malonyl-CoA to produce MPBD, olivetol or olivetolic acid. Yeast cells may be mutated, genes from other species may be introduced, genes may be upregulated or downregulated, or the yeast cells may be otherwise genetically modified to increase production of olivetolic acid, CBGa or downstream phytocannabinoids. In addition to introduction of a PKS and an olivetolic acid cyclase such as csOAC, additional modifications may be made to the yeast cell to increase the availability of malonyl-CoA, GPP, or other input metabolites to support the biosynthetic pathways of any of FIG. 42.

[0726] As shown in FIG. 32, DiPKS^{G1516R} includes an ACP domain. The ACP domain of DiPKS^{G1516R} requires a phosphopantetheine group as a co-factor. NpgA is a 4′-phosphopantethienyl transferase from Aspergillus nidulans. A codon-optimized copy of NpgA for S. cerevisiae may be introduced into S. cerevisiae and transformed into the S. cerevisiae, including by homologous recombination. In HB144, an NpgA gene cassette was integrated into the genome of Saccharomyces cerevisiae at Flagfeldt site 14.

[0727] Expression of NpgA provides the A. nidulans phosphopantetheinyl transferase for greater catalysis of loading the phosphopantetheine group onto the ACP domain of a PKS. As a result, the reaction catalyzed by DiPKS^{G1516R} (FIG. 42) or the other PKS enzymes may occur at greater rate, providing a greater amount of olivetolic acid. As shown above in Table 62, HB144 includes an integrated polynucleotide including a coding sequence NpgA, as does each modified yeast strain based on HB144 (HB259, HB309, HB310, HB742, HB801, HB865, HB866, HB867, HB868, HB869, HB870, HB873, HB874, HB875, HB877, HB1030, HB1113 and HB1114).

[0728] The sequence of the integrated DNA coding for NpgA is shown in SEQ ID NO: 479, and includes the Tef1 Promoter, the NpgA coding sequence and the Prm9 terminator. Together the Tef1p, NpgA, and Prm9t are flanked by genomic DNA sequences promoting integration into Flagfeldt site 14 in the S. cerevisiae genome.

[0729] The yeast strains may be modified for increasing available malonyl-CoA. Lowered mitochondrial acetaldehyde catabolism results in diversion of the acetaldehyde from ethanol catabolism into acetyl-CoA production, which in turn drives production of malonyl-CoA and downstream polyketides and terpenoids. S. cerevisiae may be modified to express an acetyl-CoA synthase from Salmonella enterica with a substitution modification of Leucine to Proline at residue 641 (“ACs^{L641P}”), and with aldehyde dehydrogenase 6 from S. cerevisiae (“Ald6”). The Leu641 Pro mutation removes downstream regulation of Acs, providing greater activity with the Acs^{L641P} mutant than the wild type Acs. Together, cytosolic expression of these two enzymes increases the concentration of acetyl-CoA in the cytosol. Greater acetyl-CoA concentrations in the cytosol result in lowered mitochondrial catabolism, bypassing mitochondrial pyruvate dehydrogenase (“PDH”), providing a PDH bypass. As a result, more acetyl-CoA is available for malonyl-CoA production.

[0730] SEQ ID NO:485 includes coding sequences for the genes for Ald6 and SeAcsL641P, promoters, terminators, and integration site homology sequences for integration into the S. cerevisiae genome at Flagfeldt-site 19. As shown in Table 64 a portion of SEQ ID NO:485 from bases 1444 to 2949 codes for Ald6 under the TDH3 promoter, and bases 3888 to 5843 code for SeAcsL641P under the Tef1P promoter.

[0731] S. cerevisiae may include modified expression of Maf1 or other regulators of tRNA biosynthesis. Overexpressing native Maf1 has been shown to reduce loss of IPP to tRNA biosynthesis and thereby improve monoterpene yields in yeast. IPP is an intermediate in the mevalonate pathway. As shown in Table 62, HB742 includes an integrated polynucleotide including a coding sequence for Maf1 under the Tef1 promoter, as does each modified yeast strain based on HB742 (H1B801, H B861, H B862, H B814 and H B888).

[0732] SEQ ID NO:486 is a polynucleotide that was integrated into the S. cerevisiae genome at Flagfeldt-site 5 for genomic integration of Maf1 under the Tef1 promoter. SEQ ID NO: 486 includes the Tef1 promoter, the native Maf1 gene, and the Prm9 terminator. Together, Tef1, Maf1, and Prm9 are flanked by genomic DNA sequences for promoting integration into the S. cerevisiae genome.

[0733] The yeast cells may be modified for increasing available GPP. S. cerevisiae may have one or more other mutations in Erg20 or other genes for enzymes that support metabolic pathways that deplete GPP. Erg20 catalyzes GPP production in the yeast cell. Erg20 also adds one subunit of 3-isopentyl pyrophosphate (“IPP”) to GPP, resulting in farnesyl pyrophosphate (“FPP”), a metabolite used in downstream sesquiterpene and sterol biosynthesis. Some mutations in Erg20 have been demonstrated to reduce conversion of GPP to FPP, increasing available GPP in the cell. A substitution mutation Lys197Glu in Erg20 lowers conversion of GPP to FPP by Erg20. As shown in Table 62, base strain HB742 expresses the Erg20^{K197E} mutant protein. Similarly, each modified yeast strain based on any of HB742, (HB801, HB861, HB862, HB814 and HB888) includes an integrated polynucleotide coding for the Erg20^{K197E} mutant integrated into the yeast genome.

[0734] SEQ ID NO:487 is a CDS coding for the Erg20^{K197E} protein under control of the Tpi1p promoter and the Cyc1t terminator, and a coding sequence for the KanMX protein under control of the Tef1p promoter and the Tef1t terminator.

[0735] SEQ ID NO:488 is a CDS coding for the Erg20 protein under control of the Erg1p promoter and the Adh1t terminator, and flanking sequences for homologous recombination. The Erg1 promoter is downregulated by the presence of large amounts of Ergosterol in the cell. When the cells are growing and there is not much ergosterol in the cell, the Erg1 promoter aids in the expression of the native Erg20 protein that allows the cells to grow without any growth defects associated with the attenuation of FPP synthase activity. When the cells have high amounts of ergosterol present in later stages of growth then the Erg1 promoter is inhibited leading to the cessation of expression of the native Erg20 protein. The extant copies of the native Erg20 protein in the cell are quickly degraded due the UB14 degradation tag. This allows the mutant Erg20K197E to be functional leading to GPP accumulation.

[0736] SEQ ID NO:489 is a CDS coding for the truncated HMGr1 under control of the Tdh3p promoter and the Adh1t terminator, and the IDI1 protein under control of the Tef1p promoter and the Prm9t terminator, and flanking sequences for homologous recombination of both sequences for genome integration. The HMG1 protein catalyzed reduction and the IDI1 catalyzed isomerization have previously been identified as rate limiting steps in the eukaryotic mevalonic pathway. Thus, over-expression of these proteins have been demonstrated to alleviate the bottlenecks in the mevalonate pathway and increase the carbon flux for GPP and FPP production.

[0737] Another approach to increasing cytosolic malonyl-CoA is to upregulate Acc1, which is the native yeast malonyl-CoA synthase. In HB742, the promoter sequence of the Acc1 gene was replaced by a constitutive yeast promoter for the PGK1 gene. The promoter from the PGK1 gene allows multiple copies of Acc1 to be present in the cell. The native Acc1 promoter allows only a single copy of the protein to be present in the cell at a time. As shown in Table 62, base strain HB742 includes the Acc1 under the PGK1 promoter, as does each modified yeast strain based on HB742 (H1B801, H B861, H B862, H B814 and H B888).

[0738] In addition to upregulating expression of Acc1, S. cerevisiae may include one or more modifications of Acc1 to increase Acc1 activity and cytosolic acetyl-CoA concentrations. Two mutations in regulatory sequences were identified in literature that remove repression of Acc1, resulting in greater Acc1 expression and higher malonyl-CoA production. HB742 includes a coding sequence for the Acc1 gene with Ser659Ala and Ser1157Ala modifications flanked by the PGK1 promoter and the Acc1 terminator. As a result, the S. cerevisiae transformed with this sequence will express Acc1^{S659A; S1157A}. As shown in Table 62, base strain HB742 includes Acc1^{S659A; S1157A}, as does each modified yeast strain based on HB742 (HB801, HB861, HB862, HB814 and HB888).

[0739] SEQ ID NO:490 is a polynucleotide that may be used to modify the S. cerevisiae genome at the native Acc1 gene by homologous recombination. SEQ ID NO:490 includes a portion of the coding sequence for the Acc1 gene with Ser659Ala and Ser1167Ala modifications. A similar result may be achieved, for example, by integrating a sequence with the Tef1 promoter, the Acc1 with Ser659Ala and Ser1167Ala modifications, and the Prm9 terminator at any suitable site. The end result would be that Tef1, Acc1^{S659A; S1167A} and Prm9 are flanked by genomic DNA sequences for promoting integration into the S. cerevisiae genome.

[0740] Plasmid Construction

[0741] Plasmids synthesized to apply and prepare examples of the methods and yeast cells provided herein are shown in Table 65.

TABLE 65
Plasmids and Cassettes Used to Prepare Yeast Strains

| Plasmid Name | Description | Selection |
|---|---|---|
| PLAS-36 | pCAS_Hyg_Rnr2p:Cas9:Cyc1t::tRNATyr:HDV:gRNA:Snr52t | Hygromycin |
| PLAS-43 | pESC_Gal1p:PaPKS:Cyc1t | Uracil |
| PLAS-46 | pESC_Gal1p:PaPKS^{G1429R}:Cyc1t | Uracil |
| PLAS-47 | pESC_Gal1p:FaPKS:Cyc1t | Uracil |
| PLAS-48 | pGAL_Gal1p:csOAC:Cyc1t | Uracil |
| PLAS-180 | pESC_Gal1p:PuPKS^{G1452R}:Cyc1t | Uracil |
| PLAS-191 | pESC_Gal1p:PuPKS:Cyc1t | Uracil |
| PLAS-249 | pESC_Gal1p:FaPKS^{G1434R}:Cyc1t | Uracil |

[0742] The plasmids PLAS-36 and PLAS-48 were synthesized using services provided by Twist Bioscience Corporation. PLAS-43, PLAS-46, PLAS-47, PLAS-180, PLAS-191 and PLAS-249 were synthesized using services provided by Genscript.

[0743] Stable Transformation for Strain Construction

[0744] SEQ ID NO:480, SEQ ID NO: 481, SEQ ID NO: 482, SEQ ID NO:483 and SEQ ID NO:484 each include a copy of DiPKS^{G1516R} flanked by the Gall promoter, the Prm9 terminator, and integration sequences for the sites indicated above in Table 64.

[0745] Plasmids were transformed into S. cerevisiae using the lithium acetate heatshock method as described by Gietz, et al. (2007). S. cerevisiae HB865, HB866, HB867, HB868, HB869, HB870 were prepared by transformation of HB144 with expression plasmids Plas-43, Plas-46, Plas-47, Plas-180, Plas-191 and Plas-249, respectively, for stable expression of, respectively, PaPKS, PaPKS^{G1429R}, FaPKS, PuPKS^{G1452R}, PuPKS and FaPKS^{G1434R}

[0746] To create olivetolic acid producing strains, Plas-48 was stably transformed into HB259, HB309, HB310, HB742 to express csOAC at varying copy numbers of DiPKS^{G1516R}.

[0747] HB1030 was created to provide a base strain with genomic integration of csOAC. Successful integrations were confirmed by colony polymerase chain reaction (“PCR”) and led to the creation of HB1030 with a Galactose inducible csOAC encoding gene integrated into the genome of HB144. The genomic region containing SEQ ID NO.464 was also verified by sequencing to confirm the presence of the csOAC encoding gene. HB1113 was transformed by introduction of Plas-180 into HB1030, resulting in expression of PuPKS^{G1452R} and production of olivetol. HB1114 was transformed by introduction of Plas-249 into HB1030, resulting in expression of FaPKS^{G1434R} and production of olivetol and olivetolic acid.

[0748] Yeast Growth and Feeding Conditions

[0749] Yeast cultures were grown in overnight cultures with selective media to provide starter cultures. The resulting starter cultures were then used to inoculate experimental replicate cultures to an optical density at having an absorption at 600 nm (“A₆₀₀”) of 0.1.

[0750] Table 66 shows the uracil drop out (“URADO”) amino acid supplements that are added to yeast synthetic dropout media supplement lacking leucine and uracil. “YNB” is a nutrient broth including the chemicals listed in the first two columns of Table 66. The chemicals listed in the third and fourth columns of Table 66 are included in the URADO supplement.

TABLE 66
YNB Nutrient Broth and URADO Supplement

| YNB | | | URADO Supplement | | |
|---|---|---|---|---|---|
| Chemical | Concentration | | Chemical | Concentration | |
| Monosodium Glutamate | 1.5 | g/L | Adenine | 18 | mg/L |
| Biotin | 2 | μg/L | p-Aminobenzoic acid | 8 | mg/L |
| Calcium pantothenate | 400 | μg/L | Alanine | 76 | mg/ml |
| Folic acid | 2 | μg/L | Arginine | 76 | mg/ml |
| Inositol | 2 | mg/L | Asparagine | 76 | mg/ml |
| Nicotinic acid | 400 | μg/L | Aspartic Acid | 76 | mg/ml |
| p-Aminobenzoic acid | 200 | μg/L | Cysteine | 76 | mg/ml |
| Pyridoxine HCl | 400 | μg/L | Glutamic Acid | 76 | mg/ml |
| Riboflavin | 200 | μg/L | Glutamine | 76 | mg/ml |
| Thiamine HCL | 400 | μg/L | Glycine | 76 | mg/ml |
| Citric acid | 0.1 | g/L | Histidine | 76 | mg/ml |
| Boric acid | 500 | μg/L | myo-Inositol | 76 | mg/ml |
| Copper sulfate | 40 | μg/L | Isoleucine | 76 | mg/ml |
| Potassium iodide | 100 | μg/L | Leucine | 152 | mg/ml |
| Ferric chloride | 200 | μg/L | Lysine | 76 | mg/ml |
| Magnesium sulfate | 400 | μg/L | Methionine | 76 | mg/ml |
| Sodium molybdate | 200 | μg/L | Phenylalanine | 76 | mg/ml |
| Zinc sulfate | 400 | μg/L | Proline | 76 | mg/ml |
| Potassium phosphate monobasic | 1.0 | g/L | Serine | 76 | mg/ml |
| Magnesium sulfate | 0.5 | g/L | Threonine | 76 | mg/ml |
| Sodium chloride | 0.1 | g/L | Tryptophan | 76 | mg/ml |
| Calcium chloride | 0.1 | g/L | Tyrosine | 76 | mg/ml |

| | | | | |
|---|---|---|---|---|
| (blank cell) | (blank cell) | Valine | 76 | mg/ml |

[0751] Quantification of Metabolites

[0752] Metabolite extraction was performed with 300 μl of Acetonitrile added to 100 μl culture in a new 96-well deepwell plate, followed by 30 min of agitation at 950 rpm. The solutions were then centrifuged at 3,750 rpm for 5 min. 200 μl of the soluble layer was removed and stored in a 96-well v-bottom microtiter plate. Samples were stored at −20° C. until analysis.

[0753] Intracellular metabolites were quantified using high performance liquid chromatography (“HPLC”) and mass spectrometry (“MS”) methods. Quantification of olivetolic acid, CBGa and THCa was performed using HPLC-MS on an Acquity UPLC-TQD MS.

[0754] Quantification of olivetolic acid was performed by HPLC on a Waters HSS 1×50 mm column with a 1.8 μm particle size. Eluent A1 was 0.1% formic acid in water, and eluent El was 0.1% formic acid in acetonitrile. The ratios of A1:B1 were 70/30 at 0.00 min, 50/50 at 1.2 min, 30/70 at 1.70 min and 70/30 at 1.71 min. The column temperature was 45° C., the flow rate was 0.6 ml/min.

[0755] After HPLC separation, samples were injected into the mass spectrometer by electrospray ionization and analyzed in positive mode. The capillary temperature was held at 380° C. The capillary voltage was 3 kV, the source temperature was 150° C., the desolvation gas temperature was 450° C., the desolvation gas flow (nitrogen) was 800 L/hr, and the cone gas flow (nitrogen) was 50 L/hr.

TABLE 67
Detection parameters for CBGa and THCa

| Parameter | MPBD | Olivetol | Olivetolic Acid |
|---|---|---|---|
| Retention time | 1.35 min | 1.40 min | 1.28 min |
| Ion | [M − H]⁺ | [M − H]⁺ | [M − H]⁺ |
| Mass (m/z) | 195.1 | 181.1 | 223.01 |
| Mode | ES+, MRM | ES+, MRM | ES+, MRM |
| Transition | → 125 | → 71 | → 171 |
| Collision | 15 | 15 | 20 |
| Span | 0 | 0 | 0 |
| Dwell (s) | 0.2 | 0.2 | 0.2 |
| Cone (V) | 26 | 26 | 35 |

[0756] Different concentrations of known standards were injected to create a linear standard curve. Standards for MPBD, Olivetol and Olivetolic Acid were purchased from Toronto Research Chemicals.

### EXAMPLES—PART 6

### Example 16

[0757] The homologs of DiPKS were synthesized by GenScript and subsequently transformed into HB144. Twelve single colony replicates of each of HB144, HB259, HB867, HB870, HB869, HB868, HB865 and HB866 were grown in 1 ml of YNB-URA media (2.1 g/L of YNB+1.8 g/L of URADO+20 g/L glucose+200 ug/L geneticin+50 ug/L ampicillin) in 96-well deepwell plates. Twelve single colony replicates of HB144 and HB259 were grown in SC Media (2.1 g/L of YNB+1.8 g/L of URADO+20 g/L glucose+76 mg/l uracil+200 ug/l geneticin+50 ug/l ampicillin). The cultures were incubated for 96 hours at 30° C. at 950 RPM. After 96 hours the metabolites are extracted and quantified using HPLC-MS.

[0758] Only HB867 (FaPKS) produced MPBD. The other homologs of DiPKS did not show any MPBD production.

[0759] HB870 and HB868, produced olivetol from glucose. HB870 (FaPKS^{G1434R}) demonstrated that mutation of the c-met domain of FaPKS shifted the product profile completely from MPBD to olivetol. The mutation in the c-met domain of HB868 (PuPKS^{G1425R}) also led to the production of olivetol. This data demonstrates that PuPKS^{G1425R} is functional in yeast, and raises the possibility that its wild type product, which may be a methylated analogue of olivetol with a structure different than that of MPBD, is not being measured.

[0760] FIG. 43 shows the yields of MPBD and olivetol. Production of MPBD and olivetol from raffinose and galactose was observed, demonstrating direct production in yeast of MPBD and olivetol without hexanoic acid. The data from FIG. 43 is tabulated in Table 68.

TABLE 68
Production data for MPBD and olivetol
in eight strains of S. cerevisia

| | | MPBD | | olivetol | |
|---|---|---|---|---|---|
| Variable | Strain# | (mg/)l | STDEV | (mg/l) | STDEV |
| −ve Control | HB144 | 0.00 | 0.00 | 0.00 | 0.00 |
| DiPKS^{G1516R} | HB259 | 0.00 | 0.00 | 4.89 | 0.35 |
| FaPKS | HB867 | 11.38 | 3.22 | 0.00 | 0.00 |
| FaPKS^{G1434R} | HB870 | 0.00 | 0.00 | 4.23 | 0.95 |
| PuPKS | HB869 | 0.00 | 0.00 | 0.00 | 0.00 |
| PuPKS^{G1452R} | HB868 | 0.00 | 0.00 | 3.98 | 0.49 |
| PaPKS | HB865 | 0.00 | 0.00 | 0.00 | 0.00 |
| PaPKS^{G1429R} | HB866 | 0.00 | 0.00 | 0.00 | 0.00 |

### Example 17

[0761] FaPKS^{G1434R} and PuPKS^{G1452R} were assessed for production of olivetol and olivetolic acid in the presence of csOAC.

[0762] Twelve single colony replicates of HB873, HB1113 and HB1114 were grown in 1 ml of YNB-URA media (2.1 g/L of YNB+1.8 g/L of URADO+20 g/L glucose+200 ug/l geneticin+50 ug/l ampicillin) in 96-well deepwell plates. Twelve single colony replicates of HB 1030 were grown in SC Media (2.1 g/L of YNB+1.8 g/L of URADO+20 g/L Glucose+76 mg/L uracil+200 ug/l geneticin+50 ug/l ampicillin). The cultures were incubated for 96 hours at 30° C. at 950 RPM. After 96 hours the metabolites are extracted and quantified using HPLC-MS.

[0763] The expression of the csOAC in a strain expressing FaPKS^{G1434R} let to the simultaneous production of both Olivetol and Olivetolic acid. PuPKS^{G1452R} did not produce any olivetolic acid when expressed with csOAC, however, its Olivetol production was maintained.

[0764] FIG. 44 shows the yields of olivetol and olivetolic acid from HB873, HB1113 and HB1114, with HB1030 as a negative control. Production of olivetol and olivetolic acid from raffinose and galactose was observed, demonstrating direct production in yeast of olivetol and olivetolic acid without hexanoic acid. The data from FIG. 44 is tabulated in Table 69.

TABLE 69
Production data for olivetol and olivetolic
acid in four strains of S. cerevisia

| | | olivetol | | Olivetolic | |
|---|---|---|---|---|---|
| Variable | Strain# | (mg/)l | STDEV | acid (mg/l) | STDEV |
| −ve Control | HB1030 | 0.00 | 0.00 | 0.00 | 0.00 |
| +ve Control | HB873 | 7.80 | 1.85 | 3.13 | 0.74 |
| PuPKS^{G1452R} | HB1113 | 4.13 | 0.65 | 0.00 | 0.00 |
| FaPKS^{G1434R} | HB1114 | 3.58 | 1.08 | 4.30 | 1.57 |

### Example 18

[0765] Strains HB259, HB309, HB310, HB742 were cultured to assess DiPKS^{G1516R} activity at copy numbers of 1, 3, 4 and 5 for production of olivetol. Strains HB873, HB874, HB875, HB877, were cultured to assess DiPKS^{G1516R} activity at copy numbers of 1, 3, 4 and 5 for production of olivetolic acid in the presence of plasmid-expressed csOAC. Strain HB801 was cultured for expression of DiPKS^{G1516R} at a copy number of 5 in the presence of genome-integrated csOAC.

[0766] Twelve single colony replicates of strains HB144, HB259, HB309, HB310 and HB752 were grown in 1 ml of SC Media (2.1 g/L of YNB+1.8 g/L of URADO+20 g/L glucose+76 mg/l uracil+200 ug/l geneticin+50 ug/l ampicillin) each in 96-well deepwell plates. Strains HB873, HB874, HB875 and HB877 were grown in 1 ml of YNB-URA media (2.1 g/L of YNB+1.8 g/L of URADO+20 g/L glucose+200 ug/l geneticin+50 ug/l ampicillin). The cultures were incubated for 96 hours at 30° C. at 950 RPM. After 96 hours the metabolites are extracted and quantified using HPLC-MS.

[0767] FIG. 45 shows the yields of olivetol and olivetolic acid from HB259, HB309, HB310, HB742, HB873, HB874, HB875, HB877 and HB801. Production from raffinose and galactose was observed, demonstrating direct production in yeast of olivetol and olivetolic acid without hexanoic acid. The data from FIG. 45 is tabulated in Table 70.

TABLE 70
Production data for olivetol and olivetolic
acid in nine strains of S. cerevisia

| | olivetol | | Olivetolic | | olivetolic |
|---|---|---|---|---|---|
| Strain# | (mg/)l | STDEV | acid (mg/l) | STDEV | acid:olivetol |
| HB144 | 0.00 | 0.0000 | 0.00 | 0.0000 | 0.0000 |
| HB259 | 4.38 | 0.0243 | 0.20 | 0.0009 | 0.0367 |
| HB309 | 17.07 | 0.0947 | 0.30 | 0.0013 | 0.0141 |
| HB310 | 28.47 | 0.1580 | 0.15 | 0.0007 | 0.0042 |
| HB742 | 40.00 | 0.2220 | 0.10 | 0.0004 | 0.0020 |
| HB873 | 7.80 | 0.0433 | 3.13 | 0.0140 | 0.3225 |
| HB874 | 14.63 | 0.0812 | 12.90 | 0.0575 | 0.7087 |
| HB875 | 12.47 | 0.0692 | 15.93 | 0.0711 | 1.0268 |
| HB877 | 7.38 | 0.0410 | 28.97 | 0.1292 | 3.1551 |
| HB801 | 27.26 | 0.1513 | 6.15 | 0.0274 | 0.1813 |

[0768] As the copy number of DiPKS^{G1516R} increases in the strain, the olivetol production also increases. This same effect was also seen with olivetolic acid production. As the copy-number of DiPKS^{G1516R} increases in the presence of OAC expressed from a high-copy plasmid, the amount of olivetolic acid produced also increases. The molar ratio between olivetolic acid and olivetol also increases as the copy number of DiPKS increases. This copy-number effect is also seen with the copy-number of csOAC. csOAC expressed from a high-copy plasmid in HB742 (HB877) has a greater olivetolic acid to olivetol production profile than a strain with a single copy of csOAC integrated into HB742 (HB801). HB801 has a lower production of olivetolic acid and a molar ratio of olivetolic acid to olivetol. This implies an effect of copy-number of csOAC on olivetolic acid production.

[0769] Part 7

[0770] Methods and Cells for Production of Phytocannabinoids or Phytocannabinoid Precursors Incorporating Aspects of Part 1 to Part 6

[0771] Combinations of the methods, nucleotides, and expression vectors described herein in PARTS 1 to 6 may be employed together to produce phytocannabinoids, phytocannabinoid precursors such as polyketides. Depending on the desired product, selections of characteristics of the cells and methods employed may be selected to achieve production of the cannabinoid, cannabinoid precursor, or intermediate of interest. Particular exemplary methods and cells are described hereinbelow.

[0772] Overview

[0773] A method of producing a phytocannabinoid is described, comprising culturing a host cell under suitable culture conditions to form a phytocannabinoid, said host cell comprising: (a) a polynucleotide encoding a polyketide synthase (PKS) enzyme; (b) a polynucleotide encoding an olivetolic acid cyclase (OAC) enzyme; and (c) a polynucleotide encoding a prenyltransferase (PT) enzyme; and optionally comprising: (d) a polynucleotide encoding an acyl-CoA synthase (Alk) enzyme; (e) a polynucleotide encoding a fatty acyl CoA activating (CsAAE) enzyme; and/or (f) a polynucleotide encoding a THCa synthase (OXC) enzyme.

[0774] A method of producing CBGOa via an orsellinic acid intermediate is also described, comprising culturing a host cell under suitable culture conditions to form said CBGOa, said host cell comprising a polynucleotide encoding polyketide synthase PKS110 and prenyltransferase PT72.

[0775] Methods of transforming host cells, expression vectors, and host cells comprising said polynucleotides are also described.

### Detailed Description of Part 7

[0776] A method of producing a phytocannabinoid comprising culturing a host cell under suitable culture conditions to form a phytocannabinoid is described. The host cell comprises a polynucleotide encoding a polyketide synthase (PKS) enzyme; a polynucleotide encoding an olivetolic acid cyclase (OAC) enzyme; and a polynucleotide encoding a prenyltransferase (PT) enzyme. Optionally, the host cell may also comprise a polynucleotide encoding an acyl-CoA synthase (Alk) enzyme; a polynucleotide encoding a fatty acyl CoA activating (CsAAE) enzyme; and/or a polynucleotide encoding a THCa synthase (OXC) enzyme, as well as any other polynucleotide described in any one of PARTS 1 to 6 herein.

[0777] A method is described for transforming a host cell for production of a phytocannabinoid comprising: introducing into the host cell line a polynucleotide encoding a polyketide synthase (PKS) enzyme; an olivetolic acid cyclase (OAC) enzyme; and a prenyltransferase (PT) enzyme; and optionally including said polynucleotide additionally encoding: (d) a polynucleotide encoding an acyl-CoA synthase (Alk) enzyme; (e) a polynucleotide encoding a fatty acyl CoA activating (CsAAE) enzyme; and/or (f) a polynucleotide encoding a THCa synthase (OXC) enzyme.

[0778] For example, the PKS may comprise DiPKS-1 to DiPKS-5 bearing G1516R, PKS73, or PKS80 to PKS110; the OAC may comprise csOAC or PC20; the PT may comprise PT72, PT104, PT129, PT211, PT254, PT273, or PT296; the CsAAE may comprise CsAAE1; the Alk may comprise Alk1-Alk30; and the OXC comprises OXC52; OXC53; or OXC155. Mutations of these as described herein with regard to PARTS 1-6 are encompassed.

[0779] A method of producing CBGOa via an orsellinic acid intermediate is described, comprising culturing a host cell under suitable culture conditions to form said orsellinic acid, wherein said host cell can then convert said orsellinic acid to CBGOa, said host cell comprising a polynucleotide encoding polyketide synthase PKS110 and prenyltransferase PT72.

[0780] An expression vector is described comprising: a polynucleotide encoding a polyketide synthase (PKS) enzyme; a polynucleotide encoding an olivetolic acid cyclase (OAC) enzyme; and a polynucleotide encoding a prenyltransferase (PT) enzyme. The expression vector optionally comprises a polynucleotide encoding an acyl-CoA synthase (Alk) enzyme; a polynucleotide encoding CsAAE1; and/or a polynucleotide encoding a THCa synthase (OXC) enzyme. Further, any polynucleotide as described in any one of PARTS 1-6 may be included in the expression vector.

[0781] An expression vector is described comprising a polynucleotide encoding polyketide synthase PKS110 and encoding prenyltransferase PT72. Optionally other polynucleotides may be included.

[0782] A host cell comprising these expression vectors is encompassed herein. The host cell is a bacterial cell, a fungal cell, a protist cell, or a plant cell, and may for example be a cell of a species selected from the group consisting of S. cerevisiae, E. coli, Yarrowia lipolytica, and Komagataella phaffii.

[0783] Table 71 outlines certain exemplary cells transformed with a combination of nucleic acids encoding enzymes for preparation of phytocannabinoids or precursors/intermediates in the production thereof. The enzyme names, strains, products formed, and feed used for the host cells in Examples 19-35. Briefly, host cells may be transformed with specific nucleic acids encoding enzymes permitting the cells to form a product, such as a phytocannabinoid, or an intermediate or precursor such as an aromatic polyketide. These examples are not limited to particular strains, nor are the named enzymes exhaustive of all possible enzymes such host cells may be transformed to contain.

TABLE 71
Exemplary Cells Transformed with a Combination of Enzymes
For Examples 19 to 35, The SEQ ID NO for the enzymes described in each combination is preceded by a number
in parentheses indicating in which of PART 1 to PART 7 the sequence is described

| | EX | Enzyme Name and SEQ ID Nos Provided for | | | | | Strain | | |
|---|---|---|---|---|---|---|---|---|---|
| | # | Specific Examples Described Herein | | | | | # | Product | Feed |
| Enzymes | 19 | | DiPKSG1516R | OAC | PT254 | OXC53 | HB888 | THCa | |
| | | | | (PC20) | | | | | |
| SEQ ID # | | | (1.)16 | (4.)412 | (4.)413 | (4.)421 | | | |
| Enzymes | 20 | CsAAE1 | PKS73 | OAC | PT254 | OXC155 | HB1775 | THCva | Butyric |
| | | | | (PC20) | | | | | acid |
| SEQ ID # | | (3.)405* | (3.)267 | (3.)406 | (4)413 | (3.)411* | | | |
| Enzymes | 21 | | DiPKSG1516R | OAC | PT296 | OXC53 | | THCa | |
| | | | | (PC20) | | | | | |
| SEQ ID # | | | (1.)16 | (4.)412 | (5.)440 | (4.)421 | | | |
| Enzymes | 22 | | DiPKSG1516R | OAC | PT72 | OXC53 | | THCa | |
| | | | | (PC20) | | | | | |
| SEQ ID # | | | (1.)16 | (4.)412 | (5.)438 | (4.)421 | | | |
| Enzymes | 23 | | DiPKSG1516R | OAC | PT273 | OXC53 | | THCa | |
| | | | | (PC20) | | | | | |
| SEQ ID # | | | (1.)16 | (4.)412 | (5.)439 | (4.)421 | | | |
| Enzymes | 24 | | PKS110 | [OAC | PT72 | | | CBGOa | |
| | | | | (PC20)]** | | | | | |
| SEQ ID # | | | (7.)514 | [(3.)406]* | (5.)438 | | | | |
| Enzymes | 25 | CsAAE1 | PKS73 | OAC | PT254 | | | CBGVa | Butyric |
| | | | | (PC20) | | | | | acid |
| SEQ ID # | | (3.)405* | (3.)267 | (3.)406 | (4.)413 | | | | |
| Enzymes | 26 | CsAAE1 | PKS73 | OAC | PT72 | | | CBGVa | Butyric |
| | | | | (PC20) | | | | | acid |
| SEQ ID # | | (3.)405* | (3.)267 | (3.)406 | (5.)438 | | | | |
| Enzymes | 27 | CsAAE1 | PKS73 | OAC | PT72 | OXC155 | | THCVa | Butyric |
| | | | | (PC20) | | | | | acid |
| SEQ ID # | | (3.)405* | (3.)267 | (3.)406 | (5.)438 | (3.)411* | | | |
| Enzymes | 28 | CsAAE1 | PKS73 | OAC | PT273 | OXC155 | | THCVa | Butyric |
| | | | | (PC20) | | | | | acid |
| SEQ ID # | | (3.)405* | (3.)267 | (3.)406 | (5.)439 | (3.)411* | | | |
| Enzymes | 29 | CsAAE1 | PKS73 | OAC | PT296 | OXC155 | | THCVa | Butyric |
| | | | | (PC20) | | | | | acid |
| SEQ ID # | | (3.)405* | (3.)267 | (3.)406 | (5.)440 | (3.)411* | | | |
| Enzymes | 30 | CsAAE1 | PKS73 | OAC | PT211 | OXC155 | | THCVa | Butyric |
| | | | | (PC20) | | | | | acid |
| SEQ ID # | | (3.)405* | (3.)267 | (3.)406 | (2.) 89 | (3.)411* | | | |
| Enzymes | 31 | CsAAE1 | PKS73 | OAC | PT129 | OXC155 | | THCVa | Butyric |
| | | | | (PC20) | | | | | acid |
| SEQ ID # | | (3.)405* | (3.)267 | (3.)406 | (2.) 78 | (3.)411* | | | |
| Enzymes | 32 | | DiPKSG1516R | OAC | PT254 | OXC52- | HB1890 | CBDa | |
| | | | | (PC20) | | S88A/L450G/P224- | | | |
| | | | | | | Serine insertion | | | |
| SEQ ID # | | | (1.)16 | (4.)412 | (4.)413 | (7.)500 | | | |
| Enzymes | 33 | | DiPKSG1516R | OAC | PT296 | OXC52- | | CBDa | |
| | | | | (PC20) | | S88A/L450G/P224- | | | |
| | | | | | | Serine insertion | | | |
| SEQ ID # | | | (1.)16 | (4.)412 | (5.)440 | (7.)500 | | | |
| Enzymes | 34 | | DiPKSG1516R | OAC | PT72 | OXC52- | | CBDa | |
| | | | | (PC20) | | S88A/L450G/P224- | | | |
| | | | | | | Serine insertion | | | |
| SEQ ID # | | | (1.)16 | (4.)412 | (5.)438 | (7.)500 | | | |
| Enzymes | 35 | | DiPKSG1516R | OAC | PT273 | OXC52- | | CBDa | |
| | | | | (PC20) | | S88A/L450G/P224- | | | |
| | | | | | | Serine insertion | | | |
| SEQ ID # | | | (1.)16 | (4.)412 | (5.)439 | (7.)500 | | | |

*Note on OXC notation: OXC155 and OXC53 are interchangeable in that OXC155 is defined as OstI-pro-alpha-f(I)-OXC53. The OstI-pro-alpha-f(I) tag is always used in examples where the product is THCa
**optional. but not required in Example 24

### Example 19

[0784] THCa Production

[0785] Host cell S. cerevisiae strain HB888 is transformed with the following enzymes: DiPKS G1516R (PART 1, SEQ ID NO:16); OAC (PC20) (see PART 4. SEQ ID NO:412); PT254 (see PART 4, SEQ ID NO:413); and OXC53 (see PART 4, SEQ ID NO:421) and under suitable culture and growth conditions forms THCa.

### Example 20

[0786] THCva Production with Butyric Acid Feed

[0787] Host cell S. cerevisiae strain HB1775 is transformed with the following enzymes: CsAAE1 (see PART 3, SEQ ID NO:405) PKS73 (PART 3, SEQ ID NO:267); OAC (PC20) (see PART 3, SEQ ID NO:406); PT254 (see PART 4, SEQ ID NO:413); and OXC155 (see PART 3, SEQ ID NO:411) and together with a butyric acid feed under suitable culture and growth conditions, forms THCva.

### Example 21

[0788] THCa Production

[0789] A S. cerevisiae host cell is transformed with the following enzymes: DiPKS G1516R (PART 1, SEQ ID NO:16); OAC (PC20) (see PART 4, SEQ ID NO:412); PT296 (see PART 5, SEQ ID NO:440); and OXC53 (see PART 4, SEQ ID NO:421) and is cultured under suitable culture and growth conditions to form THCa.

### Example 22

[0790] THCa Production

[0791] A S. cerevisiae host cell is transformed with the following enzymes: DiPKS G1516R (PART 1, SEQ ID NO:16); OAC (PC20) (see PART 4, SEQ ID NO:412); PT72 (see PART 5, SEQ ID NO:438); and OXC53 (see PART 4, SEQ ID NO:421) and is cultured under suitable culture and growth conditions to form THCa.

### Example 23

[0792] THCa Production

[0793] A S. cerevisiae host cell is transformed with the following enzymes: DiPKS G1516R (PART 1, SEQ ID NO:16); OAC (PC20) (see PART 4, SEQ ID NO:412); PT273 (see PART 5, SEQ ID NO:439); and OXC53 (see PART 4, SEQ ID NO:421) and is cultured under suitable culture and growth conditions to form THCa.

### Example 24

[0794] Cannabigiorcins: Cannabigiorcinic Acid Production (CBGOa)

[0795] Cannabigiorcins are cannabinoids built using an orsellinic acid polyketide. As a result of using orsellinic acid in place of olivetolic acid, cannbigiorcins have a C1 alkyl tail instead of the C5 tail found in most well-known cannabinoids, as shown below with regard to CBGOa, CBGa, THCOad THCa.

[0796] A S. cerevisiae host cell is transformed with the following enzymes: PKS110 (PART 7, SEQ ID NO:514) and PT72 (see PART 5, SEQ ID NO:438), and is cultured under suitable culture and growth conditions to form CBGOa.

[0797] Orsellenic acid may be produced in yeast using PKS110 (data shown in Table 72) and thus, the method of producing CBGOa using PKS110 and PT72 is encompassed herein.

[chemical structure]

TABLE 72
In vivo production of orsellinic acid using PKS110

| Strain | Enzyme | Orsellenic acid (mg/L) |
|---|---|---|
| HB959 | PKS110 | 43.5 |
| HB144 | None | 0 |

### Example 25

[0798] CBGVa Production with Butyric Acid Feed

[0799] Host cell S. cerevisiae is transformed with the following enzymes: CsAAE1 (see PART 3, SEQ ID NO:405) PKS73 (PART 3, SEQ ID NO:267); OAC (PC20) (see PART 3. SEQ ID NO:406); and PT254 (see PART 4, SEQ ID NO:413); and together with a butyric acid feed under suitable culture and growth conditions, forms CBGVa.

### Example 26

[0800] CBGVa Production with Butyric Acid Feed

[0801] Host cell S. cerevisiae is transformed with the following enzymes: CsAAE1 (see PART 3, SEQ ID NO:405) PKS73 (PART 3, SEQ ID NO:267); OAC (PC20) (see PART 3, SEQ ID NO:406); and PT72 (see PART 5, SEQ ID NO:438); and together with a butyric acid feed under suitable culture and growth conditions, forms CBGVa.

### Example 27

[0802] THCVa Production with Butyric Acid Feed

[0803] Host cell S. cerevisiae is transformed with the following enzymes: CsAAE1 (see PART 3, SEQ ID NO:405) PKS73 (PART 3, SEQ ID NO:267); OAC (PC20) (see PART 3. SEQ ID NO:406); PT72 (see PART 5, SEQ ID NO:438); and OXC155 (PART 3, SEQ ID NO:411), and together with a butyric acid feed under suitable culture and growth conditions, forms THCVa.

### Example 28

[0804] THCVa Production with Butyric Acid Feed

[0805] Host cell S. cerevisiae is transformed with the following enzymes: CsAAE1 (see PART 3, SEQ ID NO:405) PKS73 (PART 3, SEQ ID NO:267); OAC (PC20) (see PART 3. SEQ ID NO:406); PT273 (see PART 5, SEQ ID NO:439); and OXC155 (PART 3, SEQ ID NO:411), and together with a butyric acid feed under suitable culture and growth conditions, forms THCVa.

### Example 29

[0806] THCVa Production with Butyric Acid Feed

[0807] Host cell S. cerevisiae is transformed with the following enzymes: CsAAE1 (see PART 3, SEQ ID NO:405) PKS73 (PART 3, SEQ ID NO:267); OAC (PC20) (see PART 3. SEQ ID NO:406); PT296 (see PART 5, SEQ ID NO:440); and OXC155 (PART 3, SEQ ID NO:411), and together with a butyric acid feed under suitable culture and growth conditions, forms THCVa.

### Example 30

[0808] THCVa Production with Butyric Acid Feed

[0809] Host cell S. cerevisiae is transformed with the following enzymes: CsAAE1 (see PART 3, SEQ ID NO:405) PKS73 (PART 3, SEQ ID NO:267); OAC (PC20) (see PART 3. SEQ ID NO:406); PT211 (see PART 2, SEQ ID NO:89); and OXC155 (PART 3, SEQ ID NO:411), and together with a butyric acid feed under suitable culture and growth conditions, forms THCVa.

### Example 31

[0810] THCVa Production with Butyric Acid Feed

[0811] Host cell S. cerevisiae is transformed with the following enzymes: CsAAE1 (see PART 3, SEQ ID NO:405) PKS73 (PART 3, SEQ ID NO:267); OAC (PC20) (see PART 3. SEQ ID NO:406); PT129 (see PART 2, SEQ ID NO:78); and OXC155 (PART 3, SEQ ID NO:411), and together with a butyric acid feed under suitable culture and growth conditions, forms THCVa.

[0812] Strain, Growth and Media: As pertaining to Examples 19 to 31, strains HB959, HB144 and others described herein, were grown on yeast minimal media with a composition of 1.7 g/L YNB without ammonium sulfate+1.4 g/L amino acid supplement dropout supplement lacking URA, HIS, LEU and TRP+1.5 g/L magnesium L-glutamate) with 2% w/v galactose, 2% w/v raffinose, 200 μg/l geneticin, and 200 ug/L ampicillin (Sigma-Aldrich Canada).

[0813] Experimental Conditions: 3-6 single colony replicates of strains were tested in this study. All strains were grown in 1 ml media for 96 hours in 96-well deepwell plates. The deepwell plates were incubated at 30° C. and shaken at 950 rpm for 96 hrs. Metabolite extraction was performed by adding 270 μl of 56% acetonitrile to 30 μl of culture in a fresh 96-well deepwell plates. The plates were then centrifuged at 3750 rpm for 5 min. 200 μl of the soluble layer was removed and stored in a 96-well v-bottom microtiter plate. Samples were stored at −20° C. until analysis.

[0814] Samples were quantified using HPLC-MS analysis

[0815] Table 73 lists and describes the strains used in Examples 19-31.

TABLE 73
Strains used in this study

| Strain # | Background | Plasmids | Genotype | Notes |
|---|---|---|---|---|
| HB144 | -URA, -LEU | None | Saccharomyces cerevisiae | Base |
| | | | CEN.PK2; ΔLEU2; ΔURA3; | strain |
| | | | Erg20K197E::KanMx; ALD6; ASC1L641P; | |
| | | | NPGA; MAF1; PGK1p:Acc1; tHMGR1; IDI | |
| HB965 | -URA, -LEU | None | Saccharomyces cerevisiae CEN.PK2; | Base |
| | | | ΔLEU2; ΔURA3; Erg20K197E::KanMx; | strain |
| | | | ALD6; ASC1L641P; NPGA; MAF1; | |
| | | | PGK1p:Acc1; tHMGR1; IDI; | |
| | | | DiPKS_G1516R X 5; ACC1_S659A_S1157A; | |
| | | | UB14p:ERG20; pGAL:OAC; pGAL:PT254 | |
| HB1202 | -URA, -LEU | None | Saccharomyces cerevisiae CEN.PK2; | Base |
| | | | ΔLEU2; ΔURA3; Erg20K197E::KanMx; | strain |
| | | | ALD6; ASC1L641P; NPGA; MAF1; | |
| | | | PGK1p:Acc1; tHMGR1; IDI; | |
| | | | DiPKS_G1516R X 5; ACC1_S659A_S1157A; | |
| | | | UB14p:ERG20; Tef1p:OAC; Tef1p:PT254 | |
| HB1740 | -URA, -LEU | PLAS415 | Saccharomyces cerevisiae CEN.PK2; | HB965 |
| | | | ΔLEU2; ΔURA3; Erg20K197E::KanMx; | |
| | | | ALD6; ASC1L641P; NPGA; MAF1; | |
| | | | PGK1p:Acc1; tHMGR1; IDI; | |
| | | | DiPKS_G1516R X 5; ACC1_S659A_S1157A; | |
| | | | UB14p:ERG20; pGAL:OAC; pGAL:PT254 | |
| HB1955 | -URA, -LEU | PLAS458 | Saccharomyces cerevisiae | HB965 |
| | | | CEN.PK2; ΔLEU2; ΔURA3; Erg20K197E::KanMx; | |
| | | | ALD6; ASC1L641P; NPGA; MAF1; | |
| | | | PGK1p:Acc1; tHMGR1; IDI; | |
| | | | DiPKS_G1516R X 5; ACC1_S659A_S1157A; | |
| | | | UB14p:ERG20; pGAL:OAC; pGAL:PT254 | |
| HB1956 | -URA, -LEU | PLAS459 | Saccharomyces cerevisiae | HB965 |
| | | | CEN.PK2; ΔLEU2; ΔURA3; Erg20K197E::KanMx; | |
| | | | ALD6; ASC1L641P; NPGA; MAF1; | |
| | | | PGK1p:Acc1; tHMGR1; IDI; | |
| | | | DiPKS_G1516R X 5; ACC1_S659A_S1157A; | |
| | | | UB14p:ERG20; pGAL:OAC; pGAL:PT254 | |
| HB2020 | -URA, -LEU | PLAS510 | Saccharomyces cerevisiae | HB965 |
| | | | CEN.PK2; ΔLEU2; ΔURA3; Erg20K197E::KanMx; | |
| | | | ALD6; ASC1L641P; NPGA; MAF1; | |
| | | | PGK1p:Acc1; tHMGR1; IDI; | |
| | | | DiPKS_G1516R X 5; ACC1_S659A_S1157A; | |
| | | | UB14p:ERG20; pGAL:OAC; pGAL:PT254 | |
| HB2021 | -URA, -LEU | PLAS511 | Saccharomyces cerevisiae | HB965 |
| | | | CEN.PK2; ΔLEU2; ΔURA3; Erg20K197E::KanMx; | |
| | | | ALD6; ASC1L641P; NPGA; MAF1; | |
| | | | PGK1p:Acc1; tHMGR1; IDI; | |
| | | | DiPKS_G1516R X 5; ACC1_S659A_S1157A; | |
| | | | UB14p:ERG20; pGAL:OAC; pGAL:PT254 | |
| HB1792 | -URA, -LEU | PLAS512 | Saccharomyces cerevisiae | HB965 |
| | | | CEN.PK2; ΔLEU2; ΔURA3; Erg20K197E::KanMx; | |
| | | | ALD6; ASC1L641P; NPGA; MAF1; | |
| | | | PGK1p:Acc1; tHMGR1; IDI; | |
| | | | DiPKS_G1516R X 5; ACC1_S659A_S1157A; | |
| | | | UB14p:ERG20; pGAL:OAC; pGAL:PT254 | |
| HB2010 | -URA, -LEU | PLAS513 | Saccharomyces cerevisiae | HB965 |
| | | | CEN.PK2; ΔLEU2; ΔURA3; Erg20K197E::KanMx; | |
| | | | ALD6; ASC1L641P; NPGA; MAF1; | |
| | | | PGK1p:Acc1; tHMGR1; IDI; | |
| | | | DiPKS_G1516R X 5; ACC1_S659A_S1157A; | |
| | | | UB14p:ERG20; pGAL:OAC; pGAL:PT254 | |
| HB990 | -URA, -LEU | PLAS416 | Saccharomyces cerevisiae | HB965 |
| | | | CEN.PK2; ΔLEU2; ΔURA3; Erg20K197E::KanMx; | |
| | | | ALD6; ASC1L641P; NPGA; MAF1; | |
| | | | PGK1p:Acc1; tHMGR1; IDI; | |
| | | | DiPKS_G1516R X 5; ACC1_S659A_S1157A; | |
| | | | UB14p:ERG20; pGAL:OAC; pGAL:PT254 | |
| HB1971 | -URA, -LEU | PLAS460 | Saccharomyces cerevisiae | HB965 |
| | | | CEN.PK2; ΔLEU2; ΔURA3; Erg20K197E::KanMx; | |
| | | | ALD6; ASC1L641P; NPGA; MAF1; | |
| | | | PGK1p:Acc1; tHMGR1; IDI; | |
| | | | DiPKS_G1516R X 5; ACC1_S659A_S1157A; | |
| | | | UB14p:ERG20; pGAL:OAC; pGAL:PT254 | |
| HB1973 | -URA, -LEU | PLAS462 | Saccharomyces cerevisiae | HB965 |
| | | | CEN.PK2; ΔLEU2; ΔURA3; Erg20K197E::KanMx; | |
| | | | ALD6; ASC1L641P; NPGA; MAF1; | |
| | | | PGK1p:Acc1; tHMGR1; IDI; | |
| | | | DiPKS_G1516R X 5; ACC1_S659A_S1157A; | |
| | | | UB14p:ERG20; pGAL:OAC; pGAL:PT254 | |
| HB1254 | -URA, -LEU | None | Saccharomyces cerevisiae | HB1202 |
| | | | CEN.PK2; ΔLEU2; ΔURA3; Erg20K197E::KanMx; | |
| | | | ALD6; ASC1L641P; NPGA; MAF1; | |
| | | | PGK1p:Acc1; tHMGR1; IDI; | |
| | | | DiPKS_G1516R X 5; ACC1_S659A_S1157A; | |
| | | | UB14p:ERG20; pGAL:OAC; | |
| | | | pGAL:PT254; Ostl-pro-alpha-f(I)-OXC52 | |
| HB1890 | -URA, -LEU | None | Saccharomyces cerevisiae | HB1202 |
| | | | CEN.PK2; ΔLEU2; ΔURA3; Erg20K197E::KanMx; | |
| | | | ALD6; ASC1L641P; NPGA; MAF1; | |
| | | | PGK1p:Acc1; tHMGR1; IDI; | |
| | | | DiPKS_G1516R X 5; ACC1_S659A_S1157A; | |
| | | | UB14p:ERG20; pGAL:OAC; pGAL:PT254; | |
| | | | Ostl-pro-alpha-f(I)-OXC52-S225del | |
| HB959 | -URA, -LEU | None | Saccharomyces cerevisiae | HB144 |
| | | | CEN.PK2; ΔLEU2; ΔURA3; Erg20K197E::KanMx; | |
| | | | ALD6; ASC1L641P; NPGA; MAF1; | |
| | | | PGK1p:Acc1; tHMGR1; IDI; PKS110 | |

[0816] Table 74 lists the plasmids used in this example.

TABLE 74
Description of Plasmids

| | Plasmid | | | |
|---|---|---|---|---|
| # | Name | Description | Selection | Backbone |
| 1 | PLAS415 | Ostl-pro-alpha- | Uracil | pGREG- |
| | | f(I)-OXC52-VB40 | | URA |
| 2 | PLAS459 | Ostl-pro-alpha-f(I)- | Uracil | pGREG- |
| | | OXC52-L450G-VB40 | | URA |
| 3 | PLAS458 | Ostl-pro-alpha-f(I)- | Uracil | pGREG- |
| | | OXC52-S88A-VB40 | | URA |
| 4 | PLAS510 | Ostl-pro-alpha-f(I)- | Uracil | pGREG- |
| | | OXC52-A386V-VB40 | | URA |
| 5 | PLAS511 | Ostl-pro-alpha-f(I)- | Uracil | pGREG- |
| | | OXC52-G350I-VB40 | | URA |
| 6 | PLAS512 | Ostl-pro-alpha-f(I)- | Uracil | pGREG- |
| | | OXC52-R3W-VB40 | | URA |
| 7 | PLAS513 | Ostl-pro-alpha-f(I)- | Uracil | pGREG- |
| | | OXC52-P224_225insSer | | URA |
| 8 | PLAS460 | Ostl-pro-alpha-f(I)- | Uracil | pGREG- |
| | | OXC52-S88A/L450G/R3W | | URA |
| 9 | PLAS462 | Ostl-pro-alpha-f(I)- | Uracil | pGREG- |
| | | OXC52-S88A/450G/Serine | | URAHB |
| | | insertion at P224 | | |
| 11 | PLAS416 | RFP | RFP | pGREG- |
| | | | | URA |
| 12 | PLAS400 | RFP | RFP | pYES-URA |

TABLE 75
Description of Sequences

| | | | | Position of |
|---|---|---|---|---|
| SEQ ID | | | Length of | coding |
| NO: | Description | DNA/Protein | sequence | sequence |
| SEQ ID | Ostl-pro-alpha-f(I)- | Protein | 609 | all |
| NO. 492 | OXC52 | | | |
| SEQ ID | Ostl-pro-alpha-f(I)- | Protein | 609 | all |
| NO. 493 | OXC52-S88A | | | |
| SED ID | Ostl-pro-alpha-f(I)- | Protein | 609 | all |
| NO. 494 | OXC52-A386V | | | |
| SEQ ID | Ostl-pro-alpha-f(I)- | Protein | 609 | all |
| NO. 495 | OXC52-L450G | | | |
| SEQ ID | Ostl-pro-alpha-f(I)- | Protein | 609 | all |
| NO. 496 | OXC52-G350I | | | |
| SEQ ID | Ostl-pro-alpha-f(I)- | Protein | 609 | all |
| NO.497 | OXC52-R3W | | | |
| SEQ ID | Ostl-pro-alpha-f(I)- | Protein | 610 | all |
| NO. 498 | OXC52-Serine | | | |
| | insertion at P224 | | | |
| SEQ ID | Ostl-pro-alpha-f(I)- | Protein | 609 | all |
| NO. 499 | OXC52- | | | |
| | S88A/L450G/R3W | | | |
| SEQ ID | Ostl-pro-alpha-f(I)- | Protein | 610 | all |
| NO. 500 | OXC52- | | | |
| | S88A/450G/Serine | | | |
| | insertion at P224 | | | |
| SEQ ID | Ostl-pro-alpha-f(I)- | Protein | 610 | all |
| NO. 501 | OXC53 | | | |
| SEQ ID | Ostl-pro-alpha-f(I)- | Protein | 609 | all |
| NO. 502 | OXC53 - S225 del | | | |
| SEQ ID | PKS110 | Protein | 2098 | all |
| NO. 503 | | | | |
| SEQ ID | RFP | Protein | 232 | all |
| NO. 504 | | | | |
| SEQ ID | PLAS415 | DNA | 7615 | 2890-4719 |
| NO. 505 | | | | |
| SEQ ID | PLAS459 | DNA | 7615 | 2890-4719 |
| NO. 506 | | | | |
| SEQ ID | PLAS458 | DNA | 7615 | 2890-4719 |
| NO. 507 | | | | |
| SEQ ID | PLAS510 | DNA | 7615 | 2890-4719 |
| NO. 508 | | | | |
| SEQ ID | PLAS511 | DNA | 7615 | 2890-4719 |
| NO. 509 | | | | |
| SEQ ID | PLAS512 | DNA | 7615 | 2890-4719 |
| NO. 510 | | | | |
| SEQ ID | PLAS513 | DNA | 7618 | 2890-4721 |
| NO. 511 | | | | |
| SEQ ID | Ostl-pro-alpha-f(I)- | DNA | 4137 | 1339-3189 |
| NO. 512 | OXC53 | | | |
| SEQ ID | Ostl-pro-alpha-f(I)- | DNA | 4134 | 1339-3186 |
| NO. 513 | OXC53 - S225 del | | | |
| SEQ ID | PKS110 | DNA | 7717 | 728-7024 |
| NO. 514 | | | | |

TABLE 76
Modifications to base strains used in this experiment:

| | | | Integration | | |
|---|---|---|---|---|---|
| | Modification | | Region/ | | Genetic Structure of |
| # | name | SEQ ID NO. | Plasmid | Description | Sequence |
| 1 | Ostl-pro- | SEQ ID | Apel-3 | d28 THC synthase | Apel-3up::Tef1p:Ostl- |
| | alpha-f(I)- | NO: 512 | | fused with a 5′ Ostl- | pro-alpha-f(I)- |
| | OXC53 | | | pro-alpha-f(I) tag | OXC53::cyct:Apel- |
| | | | | | 3down |
| 2 | Ostl-pro- | SEQ ID | Apel-3 | d28 THC synthase | Apel-3up::Tef1p:Ostl- |
| | alpha-f(I)- | NO: 513 | | fused with a 5′ OST- | pro-alpha-f(I)-OXC53- |
| | OXC53 - | | | Proaftag. S225 is | S225del::cyct:Apel- |
| | S225 del | | | deleted. | 3down |
| 3 | PKS110 | SEQ ID | X-4 | Orsellinic acid | X-4up::pGAL:PKS110::cyct:X- |
| | | NO: 514 | | synthase | 4-3down |

### Examples 32-35

[0817] Examples are provided herein in which aspects of the above-noted details of PART 1-PART 6 are utilized in combination to produce phytocannabinoids or intermediates in the production thereof, specifically with regard to CBDa production in the following examples. Transformed cells are also described.

[0818] Method and Cells for CBDa Production

[0819] The terminal step in CBDa biosynthesis is the cyclization of CBGa by CBDa synthase. Modified CBDAs are used, which is hereafter referred to as Ostl-pro-alpha-f(I)-OXC52. When expressed inside yeast, Ostl-pro-alpha-f(I)-OXC52 has limited activity and is a bottleneck in the pathway. Through an in house protein engineering program we have discovered mutants of Ostl-pro-alpha-f(I)-OXC52 that show increased CBDAs activity in yeast. These include point mutations and single amino acid insertions. We would like to claim the process of producing CBDa in a modified yeast cell using these enzymes. A list of the best performing mutations is shown below in Table 77, which lists OXC52 mutants with improved activity in yeast.

TABLE 77
OXC52 mutants with improved activity in yeast

| Strain | Mutation | Activity relative to wild type |
|---|---|---|
| HB1668 | OXC52 | 1.00 |
| HB1955 | OXC52-S88A | 4.50 |
| HB2020 | OXC52-A386V | 3.08 |
| HB1956 | OXC52-L450G | 3.12 |
| HB2021 | OXC52-G350I | 2.44 |
| HB1792 | OXC52-R3W | 2.45 |
| HB2010 | OXC52-Serine | 5.76 |
| | insertion at P224 | |
| HB990 | RFP (negative) | 0 |

[0820] Combinations of these mutations can also be used to create enzymes with even greater activity. We would like to claim the use of a CEO synthase with any of the above listed mutations in any combination. A list of the top performing combinations discovered so far is shown below in Table 78, which shows OXC52 mutant combinations with improved activity in yeast.

TABLE 78
OXC52 mutant combinations with improved activity in yeast

| | | CBGa | CBDa | % CBGA |
|---|---|---|---|---|
| Strain | Mutation | (mg/L) | (mg/L) | turnover |
| HB1668 | OXC52 | 23.1 | 1.3 | 0.05 |
| HB1971 | OXC52-S88A/L450G/R3W | 4.9 | 12.6 | 0.38 |
| HB1973 | OXC52- S88A/450G/Serine | 3.8 | 15.4 | 0.29 |
| | insertion at P224 | | | |
| HB990 | RFP (negative) | 18.4 | 0 | 0.0 |

[0821] An interesting finding from this work is that the insertion of a serine after residue 224 greatly increases Ostl-pro-alpha-f(I)-OXC52 activity. Alternatively, if serine 225 is deleted from THCAs (OXC53) the enzyme switches its activity from producing THCA to primarily produced CBDA. We would like to claim the use of Ostl-pro-alpha-f(I)-OXC53-S225 del for producing CBDa in a modified yeast cell. Table 79 shows production of CBDa using the mutant THCa synthase described herein.

TABLE 79
Production of CBDa using a mutant THCa synthase

| | | CBGa | CBDa | THCa |
|---|---|---|---|---|
| Strain | Mutation | (mg/L) | (mg/L) | (mg/L) |
| HB1254 | Ostl-pro-alpha- | 20.9 | 0.0 | 1.4 |
| | f(I)-OXC53 | | | |
| HB1890 | Ostl-pro-alpha- | 12.6 | 2.1 | 0.1 |
| | f(I)-OXC53 - | | | |
| | S225 del | | | |

[0822] Strain Growth and Media. Strains H B1668, H B1955, H B2020, H B1956, H B2021, HB1792, HB2010, HB990, HB1668, HB1971, HB1973, and HB990 were grown on yeast minimal media with a composition of 1.7 g/L YNB without ammonium sulfate+1.96 g/L URA dropout amino acid supplement+1.5 g/L magnesium L-glutamate) with 2% w/v galactose, 2% w/v raffinose, 200 μg/l geneticin, and 200 ug/L ampicillin (Sigma-Aldrich Canada).

[0823] HB1890 and HB1254 were grown on yeast minimal media with a composition of 1.7 g/L YNB without ammonium sulfate+1.4 g/L amino acid supplement dropout supplement lacking URA, HIS, LEU and TRP+1.5 g/L magnesium L-glutamate) with 2% w/v galactose, 2% w/v raffinose, 200 μg/l geneticin, and 200 ug/L ampicillin (Sigma-Aldrich Canada).

[0824] Experimental Conditions. 3-6 single colony replicates of strains were tested in this study. All strains were grown in 1 ml media for 96 hours in 96-well deepwell plates. The deepwell plates were incubated at 30° C. and shaken at 950 rpm for 96 hrs. Metabolite extraction was performed by adding 270 μl of 56% acetonitrile to 30 μl of culture in a fresh 96-well deepwell plate. The plates were then centrifuged at 3750 rpm for 5 min. 200 μl of the soluble layer was removed and stored in a 96-well v-bottom microtiter plate. Samples were stored at −20° C. until analysis. Samples were quantified using HPLC-MS analysis

[0825] Quantification Protocol. The quantification of CBDa was performed using HPLC-MS on a Acquity UPLC-TQD MS. The chromatography and MS conditions are described below

[0826] LC conditions: Column: Waters Acquity UPLC C18 column 1×50 mm, 1.8 um. Column temperature: 45. Flow rate: 0.35 mL/min. Eluent A: H2O 0.1% Formic Acid. Eluent B: ACN 0.1% Formic Acid.

[0827] Gradient:

| Time (min) | % B | Flow rate (ml/min) |
|---|---|---|
| 0 | 90 | 0.35 |
| 1.20 | 10 | 0.35 |
| 1.21 | 90 | 0.35 |
| 2.00 | 90 | 0.35 |

[0828] ESI-MS conditions: Capillary: 4 kV. Source temperature: 150° C. Desolvation gas temperature: 400° C. Drying gas flow (nitrogen): 500 L/hr. Collision gas flow (argon): 0.10 mL/min

[0829] MRM Transition: CBDa (negative ionisation): m/z 357.5->245.1.

### Example 32

[0830] CBDa Production

[0831] A S. cerevisiae host cell is transformed with the following enzymes: DiPKS G1516R (PART 1, SEQ ID NO:16); OAC (PC20) (see PART 4, SEQ ID NO:412); PT254 (see PART 4, SEQ ID NO:413); and OXC52-S88A/L450G/P224-Serine insertion (see PART 7, SEQ ID NO:500) and is cultured under suitable culture and growth conditions to form CBDa.

### Example 33

[0832] CBDa Production

[0833] A S. cerevisiae host cell is transformed with the following enzymes: DiPKS G1516R (PART 1, SEQ ID NO:16); OAC (PC20) (see PART 4, SEQ ID NO:412); PT296 (see PART 5, SEQ ID NO:440); and OXC52-S88A/L450G/P224-Serine insertion (see PART 7, SEQ ID NO:500) and is cultured under suitable culture and growth conditions to form CBDa.

### Example 34

[0834] CBDa Production

[0835] A S. cerevisiae host cell is transformed with the following enzymes: DiPKS G1516R (PART 1, SEQ ID NO:16); OAC (PC20) (see PART 4, SEQ ID NO:412); PT72 (see PART 5, SEQ ID NO:438); and OXC52-S88A/L450G/P224-Serine insertion (see PART 7, SEQ ID NO:500) and is cultured under suitable culture and growth conditions to form CBDa.

### Example 35

[0836] CBDa Production

[0837] A S. cerevisiae host cell is transformed with the following enzymes: DiPKS G1516R (PART 1, SEQ ID NO:16); OAC (PC20) (see PART 4, SEQ ID NO:412); PT273 (see PART 5, SEQ ID NO:439); and OXC52-S88A/L450G/P224-Serine insertion (see PART 7, SEQ ID NO:500) and is cultured under suitable culture and growth conditions to form CBDa.

### Examples Only

[0838] In the preceding description, for purposes of explanation, numerous details are set forth in order to provide a thorough understanding of the embodiments. However, it will be apparent to one skilled in the art that these specific details are not required.

[0839] The embodiments described herein are intended to be examples only. Alterations, modifications and variations can be effected to the particular embodiments by those of skill in the art. The scope of the claims should not be limited by the particular embodiments set forth herein, but should be construed in a manner consistent with the specification as a whole.

[0840] The invention being thus described, it will be obvious that the same may be varied in many ways. Such variations are not to be regarded as a departure from the spirit and scope of the invention, and all such modification as would be obvious to one skilled in the art are intended to be included within the scope of the following claims.

### REFERENCES

[0841] All publications, patents and patent applications mentioned in this Specification are indicative of the level of skill those skilled in the art to which this invention pertains and are herein incorporated by reference to the same extent as if each individual publication patent, or patent application was specifically and individually indicated to be incorporated by reference.

### Patent Publications

[0842] U.S. Pat. No. 7,361,482
[0843] U.S. Pat. No. 8,884,100 (Page et al.) Aromatic Prenyltransferase from Cannabis.
[0844] WO2018148848 (Mookerjee et al.) publication of PCT/CA2018/050189, METHOD AND CELL LINE FOR PRODUCTION OF PHYTOCANNABINOIDS AND PHYTOCANNABINOID ANALOGUES IN YEAST
[0845] WO2018148849 (Mookerjee et al.) publication of PCT/CA2018/050190, METHOD AND CELL LINE FOR PRODUCTION OF POLYKETIDES IN YEAST

### Non-Patent Literature

[0846] Bai Flagfeldt, D., Siewers, V., Huang, L. and Nielsen, J. (2009) “Characterization of chromosomal integration sites for heterologous gene expression in Saccharomyces cerevisiae” Yeast, 26, 545-551.
[0847] Gagne, S. J., et al. (2012) “Identification of Olivetolic Acid Cyclase from Cannabis Sativa Reveals a Unique Catalytic Route to Plant Polyketides.” Proceedings of the National Academy of Sciences, vol. 109, no. 31, 2012, pp. 12811-12816. doi:10.1073/pnas.1200330109.
[0848] Ghosh, R., A. Chhabra, P. A. Phatale, S. K. Samrat, J. Sharma, A. Gosain, D. Mohanty, S. Saran and R. S. Gokhale (2008) “Dissecting the Functional Role of Polyketide Synthases in Dictyostelium discoideum biosynthesis of the differentiation regulating factor 4-methyl-5-pentylbenzene-1,3-diol” Journal of Biological Chemistry, 283(17), 11348-11354.
[0849] Gietz, R. D. and Schiestl, R. H., (2007) “High-efficiency yeast transformation using the LiAc/SS carrier DNA/PEG method.” Nat. Protoc. 2, 31-34.
[0850] Gietz R. D. (2014) Yeast Transformation by the LiAc/SS Carrier DNA/PEG Method (pp 1-12). In: Smith J., Burke D. (eds) Yeast Genetics. Methods in Molecular Biology (Methods and Protocols), vol 1205. Humana Press, New York, N. Y. https://doi.org/10.1007/978-1-4939-1363-3_1.
[0851] Jensen, N. B., Strucko, T., Kildegaard, K. R., David, F., Er\hat{ }Ome Maury, J., Mortensen, U. H., et al., (2014). EasyClone: method for iterative chromosomal integration of multiple genes in Saccharomyces cerevisiae. FEMS Yeast Research, Volume 14, Issue 2, pages 238-248; https://doi.org/10.1111/1567-1364.12118.
[0852] Kim, J.-M., Song, H.-Y., Choi, H.-J., So, K.-K., Kim, D.-H., Chae, K.-S., . . . Jahng, K.-Y. (2015). “Characterization of NpgA, a 4′-phosphopantetheinyl transferase of Aspergillus nidulans, and evidence of its involvement in fungal growth and formation of conidia and cleistothecia for development.” Journal of Microbiology, 53(1), 21-31 https: //doi.org/10.1007/s12275-015-4657-8.
[0853] Kuzuyama et al. (2005) Structural basis for the promiscuous biosynthetic prenylation of aromatic natural products, Nature, volume 435, pages 983-987; doi: 10.1038/nature03668.
[0854] Liu, J., Zhang, W., Du, G., Chen, J., & Zhou, J. (2013). “Overproduction of geraniol by enhanced precursor supply in Saccharomyces cerevisiae.” Journal of Biotechnology, 168(4), 446-451. https://doi.org/10.1016/J.JBIOTEC.2013.10.017.
[0855] Luo, X., Reiter, M., d'Espaux, L., Wong, J., Denby, C., Lechner, A., Zhang, Y., Grzybowski, A., Harth, S., Lin, W., Lee, H., Yu, C., Shin, J., Deng, K., Benites, V., Wang, G., Baidoo, E., Chen, Y., Dev, I., Petzold, C. and Keasling, J. (2019). “Complete biosynthesis of cannabinoids and their unnatural analogues in yeast.” Nature, 567(7746), pp. 123-126.
[0856] Oswald, Marilyne; Marc Fischer, Nicole Dirninger, Francis Karst, (2007) “Monoterpenoid biosynthesis in Saccharomyces cerevisiae.” FEMS Yeast Research, 7(3), 413-421. https://doi.org/10.1111/j.1567-1364.2006.00172.x
[0857] Peng, B., Nielsen, L. K., Kampranis, S. C., & Vickers, C. E. (2018). Engineered protein degradation of farnesyl pyrophosphate synthase is an effective regulatory mechanism to increase monoterpene production in Saccharomyces cerevisiae. Metabolic Engineering, 47, 83-93. https://doi.org/10.1016/J.YMBEN.2018.02.005.
[0858] Ro, D.-K., Paradise, E. M., Ouellet, M., Fisher, K. J., Newman, K. L., Ndungu, J. M., Keasling, J. D. (2006). Production of the antimalarial drug precursor artemisinic acid in engineered yeast. Nature, 440(7086), 940-943. JOUR. https://doi.org/10.1038/nature04640.
[0859] Ryan, O. W., Poddar, S., & Cate, J. H. D. (2016). CRISPR-Cas9 Genome Engineering in Saccharomyces cerevisiae Cells. Cold Spring Harbor Protocols, 2016(6), pdb.prot086827. https://doi.org/10.1101/pdb.prot086827.
[0860] Saeki, H., Hara, R., Takahashi, H., lijima, M., Munakata, R., Kenmoku, H., . . . Taura, F. (2018). An Aromatic Farnesyltransferase Functions in Biosynthesis of the Anti-HIV Meroterpenoid Daurichromenic Acid. Plant Physiology, 178(2), 535-551; https: //doi.org/10.1104/PP.18.00655.
[0861] Shi, S., Chen, Y., Siewers, V., & Nielsen, J. (2014). “Improving Production of Malonyl Coenzyme A-Derived Metabolites by Abolishing Snf1-Dependent Regulation of Acc1.” mBio, 5(3), e01130-14. https://doi.org/10.1128/mBio.01130-14.
[0862] Shiba, Y., Paradise, E. M., Kirby, J., Ro, D.-K., & Keasling, J. D. (2007). “Engineering of the pyruvate dehydrogenase bypass in Saccharomyces cerevisiae for high-level production of isoprenoids.” Metabolic Engineering, 9(2), 160-168. https: //doi.org/10.1016/J.YMBEN.2006.10.005.
[0863] Stout, J. M., Boubakir, Z., Ambrose, S. J., Purves, R. W., & Page, J. E. (2012). The hexanoyl-CoA precursor for cannabinoid biosynthesis is formed by an acyl-activating enzyme in Cannabis sativa trichomes. The Plant Journal, 71(3), 353-365.
[0864] Taura, Futoshi, et al. (2009) “Characterization of olivetol synthase, a polyketide synthase putatively involved in cannabinoid biosynthetic pathway.” FEBS letters 583.12 (2009): 2061-2066.
[0865] Varshavsky, A. (2011). The N-end rule pathway and regulation by proteolysis. Protein Science 20(8):1285-1476. https://doi.org/10.1002/pro.666.

The application's sequence listing, which the Patent Office published only in electronic form, follows.

SEQUENCE LISTING (514 sequences)

SEQ ID NO: 1 - protein, 351 aa, Artificial Sequence
  PT104
MNLKYKHSLKNTFGERKTIIRSKLLESHSSEDWHLSDPKKENGVVGKTQRGIFKKWDILCRFVHPYIVMATIIGVTSFSLLPLESAADLSLPFLVGVLKTLVPYVLLNIYTGGINALYDIEIDKVNKPYRPLVTGELSIKSATVIVSTALVTSLAMGIMSQSPPLLYGLVAVFLGTSAYSIKLPLLRWKNNPFLTAVAILVGRGVTHVSYYVHTQEYVLGRPFVLTRSFVFAIAIMSLFAVTFALLKDVPDVDGDRESGVQSFCILAGKEKVFWLGISILLMGYGSAMVVGASSSCLTNKLVTVLGHAALASSLWLRAQSVDLDSKESTSSLYMFVWKLYYVEHLLIHFVR

SEQ ID NO: 2 - DNA, 3564 bp, Artificial Sequence
  NpgA
tcaatcaaagcaacccacaaatcctaggctgaatcatgatatcgatggaagcaatcaacaattttatcaagaccgcaccaaagcacgactatctgacaggcggagttcatcattctggtaatgtagacgtgttacaattaagcggcaataaagaagatggtagtttagtatggaaccatacttttgttgatgtagacaacaatgtggtagctaagtttgaagacgctctcgaaaaacttgaaagtttgcaccggcgctcatcctcatccacaggcaatgaagaacacgctaacgtttaaccgaggggagtcacttcataatgatgtgagaaataagtgaatattgtaataattgttgggactccattgtcaacaaaagctataatgtaggtatacagtatatactagaagttctcctcgaggatcttggaatccacaaaagggagtcgataaatctatataataaaaattactttatcttctttcgttttatacgttgtcgtttattatcctattacgttatcaatcttcgcatttcagctttcattagatttgatgactgtttctcaaactttatgtcattttcttacaccgcataaacaacaaataatcataaaaattttagaactagacataaagcaacaggcgcgttggacttttaattttcgaggaccgcgaatccttacatcacacccaatcccccacaagtgatcccccacacaccatagcttcaaaatgtttctactccttttttactcttccagattttctcggactccgcgcatcgccgtaccacttcaaaacacccaagcacagcatactaaatttcccctctttcttcctctagggtgtcgttaattacccgtactaaaggtttggaaaagaaaaaagagaccgcctcgtttctttttcttcgtcgaaaaaggcaataaaaatttttatcacgtttctttttcttgaaaatttttttttttgatttttttctctttcgatgacctcccattgatatttaagttaataaacggtcttcaatttctcaagtttcagtttcatttttcttgttctattacaactttttttacttcttgctcattagaaagaaagcatagcaatctaatctaagttttaatctagaaaatttattataaaaggaagagaaataattaaacaatggttcaagatacctcttctgcttctacctctccaattttgactagatggtacattgataccagaccattgactgcttctactgctgctttgccattattggaaactttacaaccagccgatcaaatctccgttcaaaagtactatcacttgaaggacaagcacatgtctttggcttctaacttgttgaagtacttgttcgttcacagaaactgcagaattccatggtcctctatcgttatttctagaactccagatccacatagaaggccatgttatattccaccatctggttctcaagaggattcttttaaagatggttacaccggtatcaacgtcgagtttaatgtttctcatcaagcctccatggttgctattgctggtactgcttttactccaaattctggtggtgattctaagttgaaaccagaagttggtatcgatattacctgcgtcaacgaaagacaaggtagaaatggtgaagaaaggtccttggaatctttgagacagtacatcgatatcttctccgaagttttctctactgctgaaatggccaacattagaagattggatggtgtctcttcttcctcattgtctgctgatagattggttgattatggctacaggttgttctatacttactgggctttgaaagaagcctacattaagatgactggtgaagccttgttggctccatggttgagagaattggaattctctaatgttgttgctccagctgctgttgctgaatctggtgattctgctggtgattttggtgaaccatatactggtgttagaaccaccttgtacaagaacttggttgaagatgttagaattgaagttgctgctttgggtggtgattacttgtttgctactgctgctagaggtggtggtattggtgcttcttctagaccaggtggtggtccagatggttctggtattagatctcaagatccttggaggccattcaagaagttggatattgaaagggatattcaaccatgtgctactggtgtatgtaactgcttgtcttaaagacataaaactgaaacaacaccaattaataatagactttacagaagacgggagacactagcacacaactttaccaggcaaggtatttgacgctagcatgtgtccaattcagtgtcatttatgattttttgtagtaggatataaatatatacagcgctccaaatagtgcggttgccccaaaaacaccacggaacctcatctgttctcgtactttgttgtgacaaagtagctcactgccttattatcacattttcattatgcaacgcttcggaaaatacgatgttgaaaatgcctctagagatgaaaaacaatcgtaaaagggtcctgcgtaattgaaacatttgatcagtatgcagtggcacagaaacaaccaggaatactatagtcataggcaatacaaggtatatattggctatgcagacccctccagaaagtaccgacgtcaagttagatacacttaacgaacctagtgcacatttaattgagaaaaatgtggctcttcctaaggacatattccgttcgtacttgagttattggatctatgaaatcgctcgctatacaccagtcatgattttgtccttaaataacatactcatcactaaacattcttaacaatcagaaaatgcaaccgataaaacattataaatcttcgcggttatctggcattgttattaaccaaaaaaatgccggcctattacaagctactgttcaataaatattgttgtaatgaagacggtccaactgtacaaatacagcaaactgtcatatataaggtgtcttatgtgacagcacttgcgttattgtcagccggagtatgtctttgtcgcattctgggctttttactttctgctcagaaggaagtacgaacaagaaaaaaaaatcaccaatgcttcccttttcagtattagtttcatatttgtttacgttcaaactcgtcgtttgcgcgataacctctaaaaaagtcagttacgtaactatatcaatcagagaatgcaaaaagcactatcataaaaatgtctctaggggatgtgagacatgtcaattataagaagtgatggtgtcatagtatatatatcataaatgattatcaaagtttcaatcctttgtattttctagtttagcgccaacttttgacaaaacctaaactttagataatcatcattcttacaatttttatctggatggcaataatctcctatataaagcccagataaactgtaaaaagaatccatcactatttgaaaaaaagtcatctggcacgtttaattatcagagcagaaatgatgaagggtgttagcgccgtccattgatgcgcctggtagtcatgatttacgtataactaacacatcatgaggacggc

SEQ ID NO: 3 - DNA, 11114 bp, Artificial Sequence
  DiPKS-1
tggaccacttcttcttggacttcttaccaccagcaagagcggcagcggctttggcagctttagacaattgttgctttggaggcatgttatattatgttctgagacgtaagaaagggtgaaaattgatgttagtgtcaaaaattatattacaaaatacgcagagatattctagttcctttgatgaatgaatctttcagaaaaaaaagtcaaagcaaaagcaaaatggcctgcagactaaactgtatggtggtcttggaatgataaagatctgtttaatagatttagtagatacaatagcacatctcattacccagttatgattgacgtcattctgagttacaatgatcttaagcaacaggcgcgttggacttttaattttcgaggaccgcgaatccttacatcacacccaatcccccacaagtgatcccccacacaccatagcttcaaaatgtttctactccttttttactcttccagattttctcggactccgcgcatcgccgtaccacttcaaaacacccaagcacagcatactaaatttcccctctttcttcctctagggtgtcgttaattacccgtactaaaggtttggaaaagaaaaaagagaccgcctcgtttctttttcttcgtcgaaaaaggcaataaaaatttttatcacgtttctttttcttgaaaatttttttttttgatttttttctctttcgatgacctcccattgatatttaagttaataaacggtcttcaatttctcaagtttcagtttcatttttcttgttctattacaactttttttacttcttgctcattagaaagaaagcatagcaatctaatctaagttttaataaacaatgaacaagaactccaaaatccagtccccaaactcttctgatgttgctgttattggtgttggttttagattcccaggtaactctaatgacccagaatctttgtggaacaacttgttggatggtttcgatgctattacccaagtcccaaaagaaagatgggctacttcttttagagagatgggtttgatcaagaacaagttcggtggtttcttgaaggattctgaatggaagaatttcgaccctttgttctttggtatcggtccaaaagaagctccattcattgatccacaacaaaggttgttgttgtccatcgtttgggaatctttggaagatgcttacatcagaccagatgaattgagaggttctaacactggtgttttcatcggtgtttctaacaacgattacaccaagttgggtttccaagacaactactctatttctccatacactatgaccggctctaactcttcattgaactccaacagaatttcctactgcttcgattttagaggtccatccattactgttgataccgcttgttcttcttccttggtttctgttaatttgggtgtccaatccatccaaatgggtgaatgtaagattgctatttgcggtggtgttaacgctttgtttgatccatctacatctgttgccttttccaagttgggtgttttgtctgaaaatggcagatgcaactcttttagtgatcaagcctctggttacgttagatctgaaggtgctggtgttgttgttttgaagtctttggaacaagctaagttggatggtgatagaatctacggtgttatcaagggtgtttcctctaatgaagatggtgcttctaatggtgacaagaactctttgactactccatcttgtgaagcccaatccattaacatttctaaggctatggaaaaggcctccttgtctccatctgatatctattacattgaagcccatggtactggtactccagttggtgatccaattgaagttaaggccttgtccaagatcttctccaactctaacaacaaccagttgaacaacttctctaccgatggtaatgataacgatgatgatgatgacgataacacctctccagaaccattattgattggctcattcaagtccaacatcggtcatttggaatctgctgctggtattgcttctttgattaagtgttgcttgatgttgaagaacaggatgttggttccatccattaactgctctaatttgaacccatccattccattcgatcagtacaacatctccgttatcagagaaatcagacaattcccaaccgataagttggttaacatcggtatcaattctttcggtttcggtggttctaactgccatttgattattcaagagtacaacaacaacttcaagaacaactctaccatctgcaataacaacaacaacaacaataacaacatcgactacttgatcccaatctcctctaagactaagaagtccttggataagtacttgattttgatcaagaccaactccaactaccacaaggatatttctttcgatgacttcgtcaagttccaaatcaagtctaagcagtacaacttgtccaacagaatgactaccattgctaacgattggaactccttcattaagggttctaacgaattccacaacttgatcgaatctaaggatggtgaaggtggttcttcatcttctaacagaggtattgattccgccaatcaaatcaacactactactacctctaccatcaacgatatcgaacctttgttggttttcgttttctgtggtcaaggtccacaatggaatggtatgattaagaccttgtacaactccgagaacgttttcaagaacaccgttgatcatgttgacagcatcttgtacaagtacttcggttactccattttgaacgtcttgtctaagatcgatgataacgacgattccatcaaccatccaatagttgctcaaccatctttgttcttgttgcaaattggtttggtcgagttgtttaagtactggggtatctacccatctatctctgttggtcattctttcggtgaagtctcttcttattacttgtccggtatcatctctttggaaaccgcttgtaaaatcgtctacgtcagatcctctaatcagaacaaaactatgggttccggtaagatgttggttgtttctatgggttttaagcaatggaacgatcaattctctgctgaatggtccgatattgaaattgcttgttacaacgctccagattccatagttgttactggtaacgaagaaagattgaaagaattgtccatcaagttgtccgacgaatccaatcaaattttcaacaccttcttgaggtccccatgttcttttcattcttcccatcaagaagtcatcaagggttctatgttcgaagagttgtctaacttgcaatctactggtgaaaccgaaatccctttgttctctactgttactggtagacaagttttgtctggtcatgttactgctcaacacatctacgataatgttagagaaccagtcttgttccaaaagacgattgaatccattacctcctacatcaagtctcactacccatccaatcaaaaggttatctacgttgaaattgctccacacccaaccttgttttcattgatcaaaaagtccatcccatcctccaacaagaattcctcttctgttttgtgtccattgaacagaaaagaaaactccaacaactcctacaagaagttcgtttctcagttgtacttcaacggtgttaacgttgacttcaacttccagttgaactccatttgcgataacgttaacaacgatcaccatttgaacaacgtcaagcaaaactccttcaaagagactaccaattccttgccaagataccaatgggaacaagatgaatattggtccgaaccattgatctccagaaagaatagattggaaggtccaactacttccttgttgggtcatagaattatctacagcttcccagttttccaatccgttttggacttgcaatctgacaactacaaatacttgttggaccacttggttaacggtaagccagtttttccaggtgctggttatttggatatcatcatcgaattcttcgactaccaaaagcagcagttgaattcctctgattcctctaactcctacatcatcaacgttgacaagatccaattcttgaacccaattcacttgaccgaaaacaagttgcaaaccttgcaatcttctttcgaacctatcgttactaagaagtctgccttctctgttaacttcttcatcaaggataccgtcgaggatcaatctaaggttaagtctatgtctgacgaaacttggactaacacttgtaaggctaccatttccttggaacaacaacagccatctccatcttctactttgactttgtctaagaagcaagacttgcagatcttgagaaacagatgcgatattagcaagctagacaagtttgagttgtacgacaagatctctaagaatttgggcttgcagtacaactccttgtttcaagttgttgataccatcgaaactggtaaggattgctcttttgctactttgtctttgccagaagatactttgttcaccaccattttgaacccatgcttgttggataactgtttccatggtttgttgaccttgatcaacgaaaagggttctttcgttgtcgagtccatttcttctgtttctatctacttggagaacatcggttccttcaatcaaacttctgttggtaacgtccagttctacttgtacaccactatttctaaagccacctcctttagttctgaaggtacttgtaagttgttcaccaaggatggttccttgattttgtctatcggtaagttcatcatcaagtccaccaatccaaagtctactaagaccaacgaaactatcgaatctccattggacgaaaccttctctattgaatggcaatctaaggattctccaattccaaccccacaacaaatccaacaacaatctccattgaactctaacccatccttcattagatctaccatcttgaaggacatccagttcgaacaatactgctcctccattatccacaaagaattgatcaaccacgaaaagtacaagaaccagcaatccttcgatatcaactccttggaaaaccacttgaacgatgaccaattgatggaatccttgtccatctccaaagaatacttgagattcttcaccaggatcatctccatcattaagcaatacccaaagatcttgaacgaaaaagagctaaaagaattgaaagaaatcatcgaattgaagtacccatccgaagttcagttgttggaattcgaagttatcgagaaggtgtccatgattatcccaaagttgttgttcgaaaacgacaagcaatcttccatgaccttgttccaagataacttgttgaccaggttctactccaattctaactctaccagattctacttggaaagggtttccgaaatggtcttggaatctattagaccaatcgtcagagaaaagagggtgttcagaattttagagatcggtgctcgtacaggctctttgtctaatgttgttttgactaagttgaacacctacttgtccaccttgaattctaatggtggttctggttacaacatcatcattgagtacaccttcaccgatatttccgccaacttcattattggtgaaatccaagaaaccatgtgcaacttgtacccaaacgttactttcaagttctccgtcttggacttggagaaagagattattaactcctccgatttcttgatgggtgattacgatatagttttgatggcctacgttatccatgccgtttctaacattaagttctccatcgaacagttgtacaagttgttgtctccaagaggttggttgttgtgtattgaacctaagtccaacgttgtgttctccgatttggttttcggttgttttaatcagtggtggaactactacgatgatattagaactacccactgctccttgtctgaatctcaatggaatcagttgttgttgaaccagtccttgaacaacgaatcctcttcttcttctaactgttacggtggtttctccaacgtttcttttattggtggtgaaaaggatgtcgactcccattctttcatattgcactgccaaaaagaatccatctcccaaatgaagttagccaccactattaacaacggtttgtcatctggttccatcgttatcgttttgaactctcaacaattgaccaacatgaagtcctacccaaaggttattgagtatattcaagaggctacctctttgtgcaagaccattgaaattatcgattccaaggacgtcttgaactctaccaattcagttttggaaaagatccaaaagtccttgttggtgttctgtttgttgggttatgacttgttggagaacaactaccaagaacagtctttcgaatacgttaagttgttgaacttgatctctactaccgcctcttcatctaatgataagaaaccaccaaaggtcttgttgatcaccaagcaatctgaaagaatctccaggtctttctactccagatccttgattggtatttccagaacctctatgaacgagtacccaaatttgtccattacctctatcgatttggataccaacgactactcattgcagtctttgttgaagccaatcttcagcaactctaagttttccgacaacgagttcatcttcaaaaagggcttgatgttcgtgtccaggatctttaagaacaagcagttgctagaatcctccaacgcttttgaaactgactcttctaacttgtactgtaaggcctcttctgacttgtcttacaagtacgctattaagcagtctatgttgaccgaaaatcagatcgaaatcaaggttgaatgcgtcggtattaacttcaaggacaacctattctacaagggcttgttgccacaagaaattttcagaatgggtgacatctacaatccaccatatggtttggaatgctctggtgttattaccagaattggttctaacgtcaccgaatactcagttggtcaaaatgtttttggtttcgccagacattctttgggttctcatgttgttaccaacaaggatttggttatcttgaagccagataccatctcattttctgaagctgcttctatcccagttgtttactgtactgcttggtactccttgttcaacattggtcagttgtctaacgaagaatccatcctaattcattctgctactggtggtgtaggtttggcttctttgaatttgttgaaaatgaagaatcagcaacagcaaccattgaccaatgtttatgctactgttggctctaacgagaagaagaagttcttgatcgataacttcaacaacttgttcaaagaggacggcgaaaacattttctctaccagagacaaagaatactccaaccagttggaatccaagatcgatgttattttgaacaccttgtccggtgaattcgtcgaatctaatttcaagtccttgagatccttcggtagattgattgatttgtctgctactcacgtttacgccaatcaacaaattggtctaggtaacttcaagttcgaccacttgtattctgctgttgacttggaaagattgatcgacgaaaaacctaagttgttgcagtccatcttgcaaagaattaccaactctatcgtcaacggttccttggaaaaaattccaattaccatcttcccatccaccgaaactaaggatgctatcgaattattgtccaagagatcccatatcggtaaagttgttgtagattgcaccgatatctctaagtgtaatcctgttggtgatgtgatcaccaacttctctatgagattgccaaagccaaactaccagttgaatttgaactccaccttgttgattactggtcagtctggtttgtctatccctttgttgaattggttgttgtctaagtctggtggtaacgttaagaacgttgtcatcatttctaagtccaccatgaagtggaagttgcagactatgatttcccatttcgtttccggtttcggtatccattttaactacgttcaagtcgacatctccaactacgatgctttgtctgaagctattaagcaattgccatctgatttgccaccaatcacctctgtttttcatttggctgctatctacaacgatgttccaatggatcaagttaccatgtctaccgttgaatctgttcataaccctaaagttttgggtgccgttaacttgcatagaatctctgtttcttttggttggaagttgaaccacttcgtcttgttctcttctattactgctattaccggttacccagaccaatctatctacaattctgccaactctattttggacgctttgtccaactttagaaggtttatgggtttgccatccttctccattaacttgggtccaatgaaggatgaaggtaaggtttctaccaacaagagcatcaagaagctattcaagtctagaggtttgccaagcctatccttgaacaagttatttggtttgttggaggtcgtcatcaacaacccatctaatcatgttatcccatcccaattgatttgctccccaatcgatttcaagacctacatcgaatctttctcaactatgaggccaaagttgttacacttgcaacctaccatttccaagcagcaatcttctatcattaacgattctaccaaggcttcctccaacatttcattgcaagataagatcacctccaaggtgtctgatttgttgtccattccaatctccaagatcaacttcgatcatccattgaaacactacggcttggattctttgttgaccgttcaattcaaatcctggatcgacaaagaattcgaaaagaacttgttcacccatatccaattggccaccatctctattaactcattcttggaaaaggtgaacggcttgtctacaaacaataacaacaacaacaattccaacgtcaagtcctctccatccattgtcaaagaagaaatcgttaccttggacaaggatcaacaaccattgctattgaaagaacaccagcacattatcatctccccagatattagaatcaacaagccaaagagggaatccttgattagaaccccaatcttgaacaaattcaaccagatcaccgaatccattatcactccatctacaccatctttgtcccaatccgatgttttgaaaactccaccaatcaagtctttgaacaacactaagaactccagcttgattaacaccccaccaattcaatctgtccaacaacatcaaaagcaacaacaaaaggtccaagtcatccaacaacagcaacaaccattatccagattgtcctacaagagcaacaacaactctttcgttttgggtatcggtatttctgttccaggtgaacctatttcccaacaatccttgaaagactccatctccaatgacttttctgataaggctgaaactaacgagaaggtcaagagaatctttgagcaatctcaaatcaagaccagacacttggttagagattacactaagccagagaactccatcaagttcagacatttggaaaccattaccgatgtgaacaaccagttcaagaaagttgttccagatttggctcaacaagcctgtttgagagctttgaaagattggggtggtgataagggtgatattacccatatagtttctgttacctccaccggtattatcatcccagatgttaatttcaagttgatcgacttgttgggcttgaacaaggatgttgaaagagtgtctttgaacctaatgggttgtttggctggtttgagttctttgagaactgctgcttctttggctaaggcttctccaagaaatagaattttggttgtctgtaccgaagtctgctccttgcatttttctaatactgatggtggtgatcaaatggtcgcctcttctatttttgctgatggttctgctgcttacattattggttgtaacccaagaattgaagaaaccccattatacgaagtcatgtgctccattaacagatctttcccaaataccgaaaacgccatggtttgggatttggaaaaagaaggttggaacttgggtttggatgcttctattccaattgtcattggttctggtattgaagccttcgttgatactttgttggataaggctaagttgcaaacttccactgctatttctgctaaggattgcgaattcttgattcatactggtggcaagtccatcttgatgaacatcgaaaattccttgggtatcgacccaaagcaaactaagaatacttgggatgtttaccatgcctacggcaatatgtcatctgcctctgttattttcgttatggatcatgccagaaagtccaagtctttgccaacttactcaatttctttggcttttggtccaggtttggcttttgaaggttgtttcttgaagaacgtcgtctgaacagaagacgggagacactagcacacaactttaccaggcaaggtatttgacgctagcatgtgtccaattcagtgtcatttatgattttttgtagtaggatataaatatatacagcgctccaaatagtgcggttgccccaaaaacaccacggaacctcatctgttctcgtactttgttgtgacaaagtagctcactgccttattatcacattttcattatgcaacgcttcggaaaatacgatgttgaaaatgcctctagagatgaaaaacaatcgtaaaagggtcctgcgtaattgaaacatttgatcagtatgcagtggcacagaaacaaccaggaatactatagtcataggcaatacaaggtatatattggctatgcagacccctccagaaagtaccgacgtcaagttagatacacttaacgaacctagtgcacatttaattgagaaaaatgtggctcttcctatggacatattccgttcgtacttgagttattggatctatgaaatcgctcgctatacaccagtcatgattttgtcgaagttattatccaggaggcacggatgcaaaagatagaagacaaattaatttccttaaaattcaaaatgctcattattgtcacgctgtatgagcatttggtgaagatttcactgggaaatgttgcaataatttgataatcgttcgtattggatgaaactgtaacatcatctgtttattaagtatccgtgttattagtatatcatcacatacggtgtaagaagataacataaagattgagaaacagtcatcaaatataatggaagctgaaatgcgaggattgatg

SEQ ID NO: 4 - DNA, 10890 bp, Artificial Sequence
  DIPKS-2
acgatgattcagttcgccttctatcctttgtttacgtatttgtttatatatataactttatttttttttattaattgggctgcaagacaattttgttgtcagtgatgcctcaatccttcttttgcttccatatttaccatgtggaccctttcaaaacagagttgtatctctgcaggatgccctttttgacgtattgaatggcataattgcactgtcaaagcaacaggcgcgttggacttttaattttcgaggaccgcgaatccttacatcacacccaatcccccacaagtgatcccccacacaccatagcttcaaaatgtttctactccttttttactcttccagattttctcggactccgcgcatcgccgtaccacttcaaaacacccaagcacagcatactaaatttcccctctttcttcctctagggtgtcgttaattacccgtactaaaggtttggaaaagaaaaaagagaccgcctcgtttctttttcttcgtcgaaaaaggcaataaaaatttttatcacgtttctttttcttgaaaatttttttttttgatttttttctctttcgatgacctcccattgatatttaagttaataaacggtcttcaatttctcaagtttcagtttcatttttcttgttctattacaactttttttacttcttgctcattagaaagaaagcatagcaatctaatctaagttttaataaacaatgaacaagaactccaaaatccagtccccaaactcttctgatgttgctgttattggtgttggttttagattcccaggtaactctaatgacccagaatctttgtggaacaacttgttggatggtttcgatgctattacccaagtcccaaaagaaagatgggctacttcttttagagagatgggtttgatcaagaacaagttcggtggtttcttgaaggattctgaatggaagaatttcgaccctttgttctttggtatcggtccaaaagaagctccattcattgatccacaacaaaggttgttgttgtccatcgtttgggaatctttggaagatgcttacatcagaccagatgaattgagaggttctaacactggtgttttcatcggtgtttctaacaacgattacaccaagttgggtttccaagacaactactctatttctccatacactatgaccggctctaactcttcattgaactccaacagaatttcctactgcttcgattttagaggtccatccattactgttgataccgcttgttcttcttccttggtttctgttaatttgggtgtccaatccatccaaatgggtgaatgtaagattgctatttgcggtggtgttaacgctttgtttgatccatctacatctgttgccttttccaagttgggtgttttgtctgaaaatggcagatgcaactcttttagtgatcaagcctctggttacgttagatctgaaggtgctggtgttgttgttttgaagtctttggaacaagctaagttggatggtgatagaatctacggtgttatcaagggtgtttcctctaatgaagatggtgcttctaatggtgacaagaactctttgactactccatcttgtgaagcccaatccattaacatttctaaggctatggaaaaggcctccttgtctccatctgatatctattacattgaagcccatggtactggtactccagttggtgatccaattgaagttaaggccttgtccaagatcttctccaactctaacaacaaccagttgaacaacttctctaccgatggtaatgataacgatgatgatgatgacgataacacctctccagaaccattattgattggctcattcaagtccaacatcggtcatttggaatctgctgctggtattgcttctttgattaagtgttgcttgatgttgaagaacaggatgttggttccatccattaactgctctaatttgaacccatccattccattcgatcagtacaacatctccgttatcagagaaatcagacaattcccaaccgataagttggttaacatcggtatcaattctttcggtttcggtggttctaactgccatttgattattcaagagtacaacaacaacttcaagaacaactctaccatctgcaataacaacaacaacaacaataacaacatcgactacttgatcccaatctcctctaagactaagaagtccttggataagtacttgattttgatcaagaccaactccaactaccacaaggatatttctttcgatgacttcgtcaagttccaaatcaagtctaagcagtacaacttgtccaacagaatgactaccattgctaacgattggaactccttcattaagggttctaacgaattccacaacttgatcgaatctaaggatggtgaaggtggttcttcatcttctaacagaggtattgattccgccaatcaaatcaacactactactacctctaccatcaacgatatcgaacctttgttggttttcgttttctgtggtcaaggtccacaatggaatggtatgattaagaccttgtacaactccgagaacgttttcaagaacaccgttgatcatgttgacagcatcttgtacaagtacttcggttactccattttgaacgtcttgtctaagatcgatgataacgacgattccatcaaccatccaatagttgctcaaccatctttgttcttgttgcaaattggtttggtcgagttgtttaagtactggggtatctacccatctatctctgttggtcattctttcggtgaagtctcttcttattacttgtccggtatcatctctttggaaaccgcttgtaaaatcgtctacgtcagatcctctaatcagaacaaaactatgggttccggtaagatgttggttgtttctatgggttttaagcaatggaacgatcaattctctgctgaatggtccgatattgaaattgcttgttacaacgctccagattccatagttgttactggtaacgaagaaagattgaaagaattgtccatcaagttgtccgacgaatccaatcaaattttcaacaccttcttgaggtccccatgttcttttcattcttcccatcaagaagtcatcaagggttctatgttcgaagagttgtctaacttgcaatctactggtgaaaccgaaatccctttgttctctactgttactggtagacaagttttgtctggtcatgttactgctcaacacatctacgataatgttagagaaccagtcttgttccaaaagacgattgaatccattacctcctacatcaagtctcactacccatccaatcaaaaggttatctacgttgaaattgctccacacccaaccttgttttcattgatcaaaaagtccatcccatcctccaacaagaattcctcttctgttttgtgtccattgaacagaaaagaaaactccaacaactcctacaagaagttcgtttctcagttgtacttcaacggtgttaacgttgacttcaacttccagttgaactccatttgcgataacgttaacaacgatcaccatttgaacaacgtcaagcaaaactccttcaaagagactaccaattccttgccaagataccaatgggaacaagatgaatattggtccgaaccattgatctccagaaagaatagattggaaggtccaactacttccttgttgggtcatagaattatctacagcttcccagttttccaatccgttttggacttgcaatctgacaactacaaatacttgttggaccacttggttaacggtaagccagtttttccaggtgctggttatttggatatcatcatcgaattcttcgactaccaaaagcagcagttgaattcctctgattcctctaactcctacatcatcaacgttgacaagatccaattcttgaacccaattcacttgaccgaaaacaagttgcaaaccttgcaatcttctttcgaacctatcgttactaagaagtctgccttctctgttaacttcttcatcaaggataccgtcgaggatcaatctaaggttaagtctatgtctgacgaaacttggactaacacttgtaaggctaccatttccttggaacaacaacagccatctccatcttctactttgactttgtctaagaagcaagacttgcagatcttgagaaacagatgcgatattagcaagctagacaagtttgagttgtacgacaagatctctaagaatttgggcttgcagtacaactccttgtttcaagttgttgataccatcgaaactggtaaggattgctcttttgctactttgtctttgccagaagatactttgttcaccaccattttgaacccatgcttgttggataactgtttccatggtttgttgaccttgatcaacgaaaagggttctttcgttgtcgagtccatttcttctgtttctatctacttggagaacatcggttccttcaatcaaacttctgttggtaacgtccagttctacttgtacaccactatttctaaagccacctcctttagttctgaaggtacttgtaagttgttcaccaaggatggttccttgattttgtctatcggtaagttcatcatcaagtccaccaatccaaagtctactaagaccaacgaaactatcgaatctccattggacgaaaccttctctattgaatggcaatctaaggattctccaattccaaccccacaacaaatccaacaacaatctccattgaactctaacccatccttcattagatctaccatcttgaaggacatccagttcgaacaatactgctcctccattatccacaaagaattgatcaaccacgaaaagtacaagaaccagcaatccttcgatatcaactccttggaaaaccacttgaacgatgaccaattgatggaatccttgtccatctccaaagaatacttgagattcttcaccaggatcatctccatcattaagcaatacccaaagatcttgaacgaaaaagagctaaaagaattgaaagaaatcatcgaattgaagtacccatccgaagttcagttgttggaattcgaagttatcgagaaggtgtccatgattatcccaaagttgttgttcgaaaacgacaagcaatcttccatgaccttgttccaagataacttgttgaccaggttctactccaattctaactctaccagattctacttggaaagggtttccgaaatggtcttggaatctattagaccaatcgtcagagaaaagagggtgttcagaattttagagatcggtgctcgtacaggctctttgtctaatgttgttttgactaagttgaacacctacttgtccaccttgaattctaatggtggttctggttacaacatcatcattgagtacaccttcaccgatatttccgccaacttcattattggtgaaatccaagaaaccatgtgcaacttgtacccaaacgttactttcaagttctccgtcttggacttggagaaagagattattaactcctccgatttcttgatgggtgattacgatatagttttgatggcctacgttatccatgccgtttctaacattaagttctccatcgaacagttgtacaagttgttgtctccaagaggttggttgttgtgtattgaacctaagtccaacgttgtgttctccgatttggttttcggttgttttaatcagtggtggaactactacgatgatattagaactacccactgctccttgtctgaatctcaatggaatcagttgttgttgaaccagtccttgaacaacgaatcctcttcttcttctaactgttacggtggtttctccaacgtttcttttattggtggtgaaaaggatgtcgactcccattctttcatattgcactgccaaaaagaatccatctcccaaatgaagttagccaccactattaacaacggtttgtcatctggttccatcgttatcgttttgaactctcaacaattgaccaacatgaagtcctacccaaaggttattgagtatattcaagaggctacctctttgtgcaagaccattgaaattatcgattccaaggacgtcttgaactctaccaattcagttttggaaaagatccaaaagtccttgttggtgttctgtttgttgggttatgacttgttggagaacaactaccaagaacagtctttcgaatacgttaagttgttgaacttgatctctactaccgcctcttcatctaatgataagaaaccaccaaaggtcttgttgatcaccaagcaatctgaaagaatctccaggtctttctactccagatccttgattggtatttccagaacctctatgaacgagtacccaaatttgtccattacctctatcgatttggataccaacgactactcattgcagtctttgttgaagccaatcttcagcaactctaagttttccgacaacgagttcatcttcaaaaagggcttgatgttcgtgtccaggatctttaagaacaagcagttgctagaatcctccaacgcttttgaaactgactcttctaacttgtactgtaaggcctcttctgacttgtcttacaagtacgctattaagcagtctatgttgaccgaaaatcagatcgaaatcaaggttgaatgcgtcggtattaacttcaaggacaacctattctacaagggcttgttgccacaagaaattttcagaatgggtgacatctacaatccaccatatggtttggaatgctctggtgttattaccagaattggttctaacgtcaccgaatactcagttggtcaaaatgtttttggtttcgccagacattctttgggttctcatgttgttaccaacaaggatttggttatcttgaagccagataccatctcattttctgaagctgcttctatcccagttgtttactgtactgcttggtactccttgttcaacattggtcagttgtctaacgaagaatccatcctaattcattctgctactggtggtgtaggtttggcttctttgaatttgttgaaaatgaagaatcagcaacagcaaccattgaccaatgtttatgctactgttggctctaacgagaagaagaagttcttgatcgataacttcaacaacttgttcaaagaggacggcgaaaacattttctctaccagagacaaagaatactccaaccagttggaatccaagatcgatgttattttgaacaccttgtccggtgaattcgtcgaatctaatttcaagtccttgagatccttcggtagattgattgatttgtctgctactcacgtttacgccaatcaacaaattggtctaggtaacttcaagttcgaccacttgtattctgctgttgacttggaaagattgatcgacgaaaaacctaagttgttgcagtccatcttgcaaagaattaccaactctatcgtcaacggttccttggaaaaaattccaattaccatcttcccatccaccgaaactaaggatgctatcgaattattgtccaagagatcccatatcggtaaagttgttgtagattgcaccgatatctctaagtgtaatcctgttggtgatgtgatcaccaacttctctatgagattgccaaagccaaactaccagttgaatttgaactccaccttgttgattactggtcagtctggtttgtctatccctttgttgaattggttgttgtctaagtctggtggtaacgttaagaacgttgtcatcatttctaagtccaccatgaagtggaagttgcagactatgatttcccatttcgtttccggtttcggtatccattttaactacgttcaagtcgacatctccaactacgatgctttgtctgaagctattaagcaattgccatctgatttgccaccaatcacctctgtttttcatttggctgctatctacaacgatgttccaatggatcaagttaccatgtctaccgttgaatctgttcataaccctaaagttttgggtgccgttaacttgcatagaatctctgtttcttttggttggaagttgaaccacttcgtcttgttctcttctattactgctattaccggttacccagaccaatctatctacaattctgccaactctattttggacgctttgtccaactttagaaggtttatgggtttgccatccttctccattaacttgggtccaatgaaggatgaaggtaaggtttctaccaacaagagcatcaagaagctattcaagtctagaggtttgccaagcctatccttgaacaagttatttggtttgttggaggtcgtcatcaacaacccatctaatcatgttatcccatcccaattgatttgctccccaatcgatttcaagacctacatcgaatctttctcaactatgaggccaaagttgttacacttgcaacctaccatttccaagcagcaatcttctatcattaacgattctaccaaggcttcctccaacatttcattgcaagataagatcacctccaaggtgtctgatttgttgtccattccaatctccaagatcaacttcgatcatccattgaaacactacggcttggattctttgttgaccgttcaattcaaatcctggatcgacaaagaattcgaaaagaacttgttcacccatatccaattggccaccatctctattaactcattcttggaaaaggtgaacggcttgtctacaaacaataacaacaacaacaattccaacgtcaagtcctctccatccattgtcaaagaagaaatcgttaccttggacaaggatcaacaaccattgctattgaaagaacaccagcacattatcatctccccagatattagaatcaacaagccaaagagggaatccttgattagaaccccaatcttgaacaaattcaaccagatcaccgaatccattatcactccatctacaccatctttgtcccaatccgatgttttgaaaactccaccaatcaagtctttgaacaacactaagaactccagcttgattaacaccccaccaattcaatctgtccaacaacatcaaaagcaacaacaaaaggtccaagtcatccaacaacagcaacaaccattatccagattgtcctacaagagcaacaacaactctttcgttttgggtatcggtatttctgttccaggtgaacctatttcccaacaatccttgaaagactccatctccaatgacttttctgataaggctgaaactaacgagaaggtcaagagaatctttgagcaatctcaaatcaagaccagacacttggttagagattacactaagccagagaactccatcaagttcagacatttggaaaccattaccgatgtgaacaaccagttcaagaaagttgttccagatttggctcaacaagcctgtttgagagctttgaaagattggggtggtgataagggtgatattacccatatagtttctgttacctccaccggtattatcatcccagatgttaatttcaagttgatcgacttgttgggcttgaacaaggatgttgaaagagtgtctttgaacctaatgggttgtttggctggtttgagttctttgagaactgctgcttctttggctaaggcttctccaagaaatagaattttggttgtctgtaccgaagtctgctccttgcatttttctaatactgatggtggtgatcaaatggtcgcctcttctatttttgctgatggttctgctgcttacattattggttgtaacccaagaattgaagaaaccccattatacgaagtcatgtgctccattaacagatctttcccaaataccgaaaacgccatggtttgggatttggaaaaagaaggttggaacttgggtttggatgcttctattccaattgtcattggttctggtattgaagccttcgttgatactttgttggataaggctaagttgcaaacttccactgctatttctgctaaggattgcgaattcttgattcatactggtggcaagtccatcttgatgaacatcgaaaattccttgggtatcgacccaaagcaaactaagaatacttgggatgtttaccatgcctacggcaatatgtcatctgcctctgttattttcgttatggatcatgccagaaagtccaagtctttgccaacttactcaatttctttggcttttggtccaggtttggcttttgaaggttgtttcttgaagaacgtcgtctgaacagaagacgggagacactagcacacaactttaccaggcaaggtatttgacgctagcatgtgtccaattcagtgtcatttatgattttttgtagtaggatataaatatatacagcgctccaaatagtgcggttgccccaaaaacaccacggaacctcatctgttctcgtactttgttgtgacaaagtagctcactgccttattatcacattttcattatgcaacgcttcggaaaatacgatgttgaaaatgcctctagagatgaaaaacaatcgtaaaagggtcctgcgtaattgaaacatttgatcagtatgcagtggcacagaaacaaccaggaatactatagtcataggcaatacaaggtatatattggctatgcagacccctccagaaagtaccgacgtcaagttagatacacttaacgaacctagtgcacatttaattgagaaaaatgtggctcttcctaaggacatattccgttcgtacttgagttattggatctatgaaatcgctcgctatacaccagtcatgattttgtctatgtgttgctcttaaaatatttggatacgacatcctttatcttttttcctttaagagcaggatataagccatcaagtttctgaaaatcaaaatggtagcaacaataatgcagacgacaacaactgtgctgacgacagtcgccgcaatgtctactaccttagcatcaaattacatatcttcgcaagctagtt

SEQ ID NO: 5 - DNA, 11300 bp, Artificial Sequence
  DiPKS-3
cgggttacagtcatcgttgaaaacgatggaaaaacatgtcgagattcctcaatccatacaccattatagtccgttttatcagcttccactaattttttaaatctcagtttcttcttgaaatttagcatcgtgcatgggatagcggctagtaaaaaagaaaattaatatctcattaacaaagttattgtacataatccggtacaatattcttcaatgtactctctaatatcgagcacactggcaatattcatgcacacattcgcctaatgctgacgaatgcttaatcagtgcaattaagcaacaggcgcgttggacttttaattttcgaggaccgcgaatccttacatcacacccaatcccccacaagtgatcccccacacaccatagcttcaaaatgtttctactccttttttactcttccagattttctcggactccgcgcatcgccgtaccacttcaaaacacccaagcacagcatactaaatttcccctctttcttcctctagggtgtcgttaattacccgtactaaaggtttggaaaagaaaaaagagaccgcctcgtttctttttcttcgtcgaaaaaggcaataaaaatttttatcacgtttctttttcttgaaaatttttttttttgatttttttctctttcgatgacctcccattgatatttaagttaataaacggtcttcaatttctcaagtttcagtttcatttttcttgttctattacaactttttttacttcttgctcattagaaagaaagcatagcaatctaatctaagttttaataaacaatgaacaagaactccaaaatccagtccccaaactcttctgatgttgctgttattggtgttggttttagattcccaggtaactctaatgacccagaatctttgtggaacaacttgttggatggtttcgatgctattacccaagtcccaaaagaaagatgggctacttcttttagagagatgggtttgatcaagaacaagttcggtggtttcttgaaggattctgaatggaagaatttcgaccctttgttctttggtatcggtccaaaagaagctccattcattgatccacaacaaaggttgttgttgtccatcgtttgggaatctttggaagatgcttacatcagaccagatgaattgagaggttctaacactggtgttttcatcggtgtttctaacaacgattacaccaagttgggtttccaagacaactactctatttctccatacactatgaccggctctaactcttcattgaactccaacagaatttcctactgcttcgattttagaggtccatccattactgttgataccgcttgttcttcttccttggtttctgttaatttgggtgtccaatccatccaaatgggtgaatgtaagattgctatttgcggtggtgttaacgctttgtttgatccatctacatctgttgccttttccaagttgggtgttttgtctgaaaatggcagatgcaactcttttagtgatcaagcctctggttacgttagatctgaaggtgctggtgttgttgttttgaagtctttggaacaagctaagttggatggtgatagaatctacggtgttatcaagggtgtttcctctaatgaagatggtgcttctaatggtgacaagaactctttgactactccatcttgtgaagcccaatccattaacatttctaaggctatggaaaaggcctccttgtctccatctgatatctattacattgaagcccatggtactggtactccagttggtgatccaattgaagttaaggccttgtccaagatcttctccaactctaacaacaaccagttgaacaacttctctaccgatggtaatgataacgatgatgatgatgacgataacacctctccagaaccattattgattggctcattcaagtccaacatcggtcatttggaatctgctgctggtattgcttctttgattaagtgttgcttgatgttgaagaacaggatgttggttccatccattaactgctctaatttgaacccatccattccattcgatcagtacaacatctccgttatcagagaaatcagacaattcccaaccgataagttggttaacatcggtatcaattctttcggtttcggtggttctaactgccatttgattattcaagagtacaacaacaacttcaagaacaactctaccatctgcaataacaacaacaacaacaataacaacatcgactacttgatcccaatctcctctaagactaagaagtccttggataagtacttgattttgatcaagaccaactccaactaccacaaggatatttctttcgatgacttcgtcaagttccaaatcaagtctaagcagtacaacttgtccaacagaatgactaccattgctaacgattggaactccttcattaagggttctaacgaattccacaacttgatcgaatctaaggatggtgaaggtggttcttcatcttctaacagaggtattgattccgccaatcaaatcaacactactactacctctaccatcaacgatatcgaacctttgttggttttcgttttctgtggtcaaggtccacaatggaatggtatgattaagaccttgtacaactccgagaacgttttcaagaacaccgttgatcatgttgacagcatcttgtacaagtacttcggttactccattttgaacgtcttgtctaagatcgatgataacgacgattccatcaaccatccaatagttgctcaaccatctttgttcttgttgcaaattggtttggtcgagttgtttaagtactggggtatctacccatctatctctgttggtcattctttcggtgaagtctcttcttattacttgtccggtatcatctctttggaaaccgcttgtaaaatcgtctacgtcagatcctctaatcagaacaaaactatgggttccggtaagatgttggttgtttctatgggttttaagcaatggaacgatcaattctctgctgaatggtccgatattgaaattgcttgttacaacgctccagattccatagttgttactggtaacgaagaaagattgaaagaattgtccatcaagttgtccgacgaatccaatcaaattttcaacaccttcttgaggtccccatgttcttttcattcttcccatcaagaagtcatcaagggttctatgttcgaagagttgtctaacttgcaatctactggtgaaaccgaaatccctttgttctctactgttactggtagacaagttttgtctggtcatgttactgctcaacacatctacgataatgttagagaaccagtcttgttccaaaagacgattgaatccattacctcctacatcaagtctcactacccatccaatcaaaaggttatctacgttgaaattgctccacacccaaccttgttttcattgatcaaaaagtccatcccatcctccaacaagaattcctcttctgttttgtgtccattgaacagaaaagaaaactccaacaactcctacaagaagttcgtttctcagttgtacttcaacggtgttaacgttgacttcaacttccagttgaactccatttgcgataacgttaacaacgatcaccatttgaacaacgtcaagcaaaactccttcaaagagactaccaattccttgccaagataccaatgggaacaagatgaatattggtccgaaccattgatctccagaaagaatagattggaaggtccaactacttccttgttgggtcatagaattatctacagcttcccagttttccaatccgttttggacttgcaatctgacaactacaaatacttgttggaccacttggttaacggtaagccagtttttccaggtgctggttatttggatatcatcatcgaattcttcgactaccaaaagcagcagttgaattcctctgattcctctaactcctacatcatcaacgttgacaagatccaattcttgaacccaattcacttgaccgaaaacaagttgcaaaccttgcaatcttctttcgaacctatcgttactaagaagtctgccttctctgttaacttcttcatcaaggataccgtcgaggatcaatctaaggttaagtctatgtctgacgaaacttggactaacacttgtaaggctaccatttccttggaacaacaacagccatctccatcttctactttgactttgtctaagaagcaagacttgcagatcttgagaaacagatgcgatattagcaagctagacaagtttgagttgtacgacaagatctctaagaatttgggcttgcagtacaactccttgtttcaagttgttgataccatcgaaactggtaaggattgctcttttgctactttgtctttgccagaagatactttgttcaccaccattttgaacccatgcttgttggataactgtttccatggtttgttgaccttgatcaacgaaaagggttctttcgttgtcgagtccatttcttctgtttctatctacttggagaacatcggttccttcaatcaaacttctgttggtaacgtccagttctacttgtacaccactatttctaaagccacctcctttagttctgaaggtacttgtaagttgttcaccaaggatggttccttgattttgtctatcggtaagttcatcatcaagtccaccaatccaaagtctactaagaccaacgaaactatcgaatctccattggacgaaaccttctctattgaatggcaatctaaggattctccaattccaaccccacaacaaatccaacaacaatctccattgaactctaacccatccttcattagatctaccatcttgaaggacatccagttcgaacaatactgctcctccattatccacaaagaattgatcaaccacgaaaagtacaagaaccagcaatccttcgatatcaactccttggaaaaccacttgaacgatgaccaattgatggaatccttgtccatctccaaagaatacttgagattcttcaccaggatcatctccatcattaagcaatacccaaagatcttgaacgaaaaagagctaaaagaattgaaagaaatcatcgaattgaagtacccatccgaagttcagttgttggaattcgaagttatcgagaaggtgtccatgattatcccaaagttgttgttcgaaaacgacaagcaatcttccatgaccttgttccaagataacttgttgaccaggttctactccaattctaactctaccagattctacttggaaagggtttccgaaatggtcttggaatctattagaccaatcgtcagagaaaagagggtgttcagaattttagagatcggtgctcgtacaggctctttgtctaatgttgttttgactaagttgaacacctacttgtccaccttgaattctaatggtggttctggttacaacatcatcattgagtacaccttcaccgatatttccgccaacttcattattggtgaaatccaagaaaccatgtgcaacttgtacccaaacgttactttcaagttctccgtcttggacttggagaaagagattattaactcctccgatttcttgatgggtgattacgatatagttttgatggcctacgttatccatgccgtttctaacattaagttctccatcgaacagttgtacaagttgttgtctccaagaggttggttgttgtgtattgaacctaagtccaacgttgtgttctccgatttggttttcggttgttttaatcagtggtggaactactacgatgatattagaactacccactgctccttgtctgaatctcaatggaatcagttgttgttgaaccagtccttgaacaacgaatcctcttcttcttctaactgttacggtggtttctccaacgtttcttttattggtggtgaaaaggatgtcgactcccattctttcatattgcactgccaaaaagaatccatctcccaaatgaagttagccaccactattaacaacggtttgtcatctggttccatcgttatcgttttgaactctcaacaattgaccaacatgaagtcctacccaaaggttattgagtatattcaagaggctacctctttgtgcaagaccattgaaattatcgattccaaggacgtcttgaactctaccaattcagttttggaaaagatccaaaagtccttgttggtgttctgtttgttgggttatgacttgttggagaacaactaccaagaacagtctttcgaatacgttaagttgttgaacttgatctctactaccgcctcttcatctaatgataagaaaccaccaaaggtcttgttgatcaccaagcaatctgaaagaatctccaggtctttctactccagatccttgattggtatttccagaacctctatgaacgagtacccaaatttgtccattacctctatcgatttggataccaacgactactcattgcagtctttgttgaagccaatcttcagcaactctaagttttccgacaacgagttcatcttcaaaaagggcttgatgttcgtgtccaggatctttaagaacaagcagttgctagaatcctccaacgcttttgaaactgactcttctaacttgtactgtaaggcctcttctgacttgtcttacaagtacgctattaagcagtctatgttgaccgaaaatcagatcgaaatcaaggttgaatgcgtcggtattaacttcaaggacaacctattctacaagggcttgttgccacaagaaattttcagaatgggtgacatctacaatccaccatatggtttggaatgctctggtgttattaccagaattggttctaacgtcaccgaatactcagttggtcaaaatgtttttggtttcgccagacattctttgggttctcatgttgttaccaacaaggatttggttatcttgaagccagataccatctcattttctgaagctgcttctatcccagttgtttactgtactgcttggtactccttgttcaacattggtcagttgtctaacgaagaatccatcctaattcattctgctactggtggtgtaggtttggcttctttgaatttgttgaaaatgaagaatcagcaacagcaaccattgaccaatgtttatgctactgttggctctaacgagaagaagaagttcttgatcgataacttcaacaacttgttcaaagaggacggcgaaaacattttctctaccagagacaaagaatactccaaccagttggaatccaagatcgatgttattttgaacaccttgtccggtgaattcgtcgaatctaatttcaagtccttgagatccttcggtagattgattgatttgtctgctactcacgtttacgccaatcaacaaattggtctaggtaacttcaagttcgaccacttgtattctgctgttgacttggaaagattgatcgacgaaaaacctaagttgttgcagtccatcttgcaaagaattaccaactctatcgtcaacggttccttggaaaaaattccaattaccatcttcccatccaccgaaactaaggatgctatcgaattattgtccaagagatcccatatcggtaaagttgttgtagattgcaccgatatctctaagtgtaatcctgttggtgatgtgatcaccaacttctctatgagattgccaaagccaaactaccagttgaatttgaactccaccttgttgattactggtcagtctggtttgtctatccctttgttgaattggttgttgtctaagtctggtggtaacgttaagaacgttgtcatcatttctaagtccaccatgaagtggaagttgcagactatgatttcccatttcgtttccggtttcggtatccattttaactacgttcaagtcgacatctccaactacgatgctttgtctgaagctattaagcaattgccatctgatttgccaccaatcacctctgtttttcatttggctgctatctacaacgatgttccaatggatcaagttaccatgtctaccgttgaatctgttcataaccctaaagttttgggtgccgttaacttgcatagaatctctgtttcttttggttggaagttgaaccacttcgtcttgttctcttctattactgctattaccggttacccagaccaatctatctacaattctgccaactctattttggacgctttgtccaactttagaaggtttatgggtttgccatccttctccattaacttgggtccaatgaaggatgaaggtaaggtttctaccaacaagagcatcaagaagctattcaagtctagaggtttgccaagcctatccttgaacaagttatttggtttgttggaggtcgtcatcaacaacccatctaatcatgttatcccatcccaattgatttgctccccaatcgatttcaagacctacatcgaatctttctcaactatgaggccaaagttgttacacttgcaacctaccatttccaagcagcaatcttctatcattaacgattctaccaaggcttcctccaacatttcattgcaagataagatcacctccaaggtgtctgatttgttgtccattccaatctccaagatcaacttcgatcatccattgaaacactacggcttggattctttgttgaccgttcaattcaaatcctggatcgacaaagaattcgaaaagaacttgttcacccatatccaattggccaccatctctattaactcattcttggaaaaggtgaacggcttgtctacaaacaataacaacaacaacaattccaacgtcaagtcctctccatccattgtcaaagaagaaatcgttaccttggacaaggatcaacaaccattgctattgaaagaacaccagcacattatcatctccccagatattagaatcaacaagccaaagagggaatccttgattagaaccccaatcttgaacaaattcaaccagatcaccgaatccattatcactccatctacaccatctttgtcccaatccgatgttttgaaaactccaccaatcaagtctttgaacaacactaagaactccagcttgattaacaccccaccaattcaatctgtccaacaacatcaaaagcaacaacaaaaggtccaagtcatccaacaacagcaacaaccattatccagattgtcctacaagagcaacaacaactctttcgttttgggtatcggtatttctgttccaggtgaacctatttcccaacaatccttgaaagactccatctccaatgacttttctgataaggctgaaactaacgagaaggtcaagagaatctttgagcaatctcaaatcaagaccagacacttggttagagattacactaagccagagaactccatcaagttcagacatttggaaaccattaccgatgtgaacaaccagttcaagaaagttgttccagatttggctcaacaagcctgtttgagagctttgaaagattggggtggtgataagggtgatattacccatatagtttctgttacctccaccggtattatcatcccagatgttaatttcaagttgatcgacttgttgggcttgaacaaggatgttgaaagagtgtctttgaacctaatgggttgtttggctggtttgagttctttgagaactgctgcttctttggctaaggcttctccaagaaatagaattttggttgtctgtaccgaagtctgctccttgcatttttctaatactgatggtggtgatcaaatggtcgcctcttctatttttgctgatggttctgctgcttacattattggttgtaacccaagaattgaagaaaccccattatacgaagtcatgtgctccattaacagatctttcccaaataccgaaaacgccatggtttgggatttggaaaaagaaggttggaacttgggtttggatgcttctattccaattgtcattggttctggtattgaagccttcgttgatactttgttggataaggctaagttgcaaacttccactgctatttctgctaaggattgcgaattcttgattcatactggtggcaagtccatcttgatgaacatcgaaaattccttgggtatcgacccaaagcaaactaagaatacttgggatgtttaccatgcctacggcaatatgtcatctgcctctgttattttcgttatggatcatgccagaaagtccaagtctttgccaacttactcaatttctttggcttttggtccaggtttggcttttgaaggttgtttcttgaagaacgtcgtctgaacagaagacgggagacactagcacacaactttaccaggcaaggtatttgacgctagcatgtgtccaattcagtgtcatttatgattttttgtagtaggatataaatatatacagcgctccaaatagtgcggttgccccaaaaacaccacggaacctcatctgttctcgtactttgttgtgacaaagtagctcactgccttattatcacattttcattatgcaacgcttcggaaaatacgatgttgaaaatgcctctagagatgaaaaacaatcgtaaaagggtcctgcgtaattgaaacatttgatcagtatgcagtggcacagaaacaaccaggaatactatagtcataggcaatacaaggtatatattggctatgcagacccctccagaaagtaccgacgtcaagttagatacacttaacgaacctagtgcacatttaattgagaaaaatgtggctcttcctaaggacatattccgttcgtacttgagttattggatctatgaaatcgctcgctatacaccagtcatgattttgtctgagatcgacttgcatcaacctttgaaaaatataaggatgagaaagtgaaatcggttttttttttccattgtcgtcatcaacatgattttttaaataaataaatacgattttttattttttttcccttctttgtttttgttttgcttattcccatcttcattattaaattcttccgctcttaataaaggagtttttttattatcttcttgtgtaatcatcctttttctttaattttcttccttttctttttctctttactggtttttttacttctttattctcaaccatctaaagaatattattgctttctaccaataaaatctgttaattctatttggattgtcgtctactcaagtctcgcctagtaaataaacgataaacaaatttgaagtaagaataacaatatagggagagaaatttttctatttttaatttcgaaacaggtaccaaaaaatctaagttcactttagcactatttgggaaagcttttatataaaaaatctgaaacaaaatcatatcaaag

SEQ ID NO: 6 - DNA, 11140 bp, Artificial Sequence
  DiPKS-4
cggcacccaccataaagattactttagcgttggggttgcttttcatatgagcagcgatcttcctaaccgacatctctgtagaggcggtagaaacagacatcgaaacacggagagatcgcggtacgtctggttggtagctcagtgacgggcacagatagcgacatttactgatacagagacagttacgaaagatggaaacacatgcagagaatgtggtctattccttattcttaagatcggcgaagctaacagagttaatgctgggccatagctggacggcagaaagcacgcaggaagcaacaggcgcgttggacttttaattttcgaggaccgcgaatccttacatcacacccaatcccccacaagtgatcccccacacaccatagcttcaaaatgtttctactccttttttactcttccagattttctcggactccgcgcatcgccgtaccacttcaaaacacccaagcacagcatactaaatttcccctctttcttcctctagggtgtcgttaattacccgtactaaaggtttggaaaagaaaaaagagaccgcctcgtttctttttcttcgtcgaaaaaggcaataaaaatttttatcacgtttctttttcttgaaaatttttttttttgatttttttctctttcgatgacctcccattgatatttaagttaataaacggtcttcaatttctcaagtttcagtttcatttttcttgttctattacaactttttttacttcttgctcattagaaagaaagcatagcaatctaatctaagttttaataaacaatgaacaagaactccaaaatccagtccccaaactcttctgatgttgctgttattggtgttggttttagattcccaggtaactctaatgacccagaatctttgtggaacaacttgttggatggtttcgatgctattacccaagtcccaaaagaaagatgggctacttcttttagagagatgggtttgatcaagaacaagttcggtggtttcttgaaggattctgaatggaagaatttcgaccctttgttctttggtatcggtccaaaagaagctccattcattgatccacaacaaaggttgttgttgtccatcgtttgggaatctttggaagatgcttacatcagaccagatgaattgagaggttctaacactggtgttttcatcggtgtttctaacaacgattacaccaagttgggtttccaagacaactactctatttctccatacactatgaccggctctaactcttcattgaactccaacagaatttcctactgcttcgattttagaggtccatccattactgttgataccgcttgttcttcttccttggtttctgttaatttgggtgtccaatccatccaaatgggtgaatgtaagattgctatttgcggtggtgttaacgctttgtttgatccatctacatctgttgccttttccaagttgggtgttttgtctgaaaatggcagatgcaactcttttagtgatcaagcctctggttacgttagatctgaaggtgctggtgttgttgttttgaagtctttggaacaagctaagttggatggtgatagaatctacggtgttatcaagggtgtttcctctaatgaagatggtgcttctaatggtgacaagaactctttgactactccatcttgtgaagcccaatccattaacatttctaaggctatggaaaaggcctccttgtctccatctgatatctattacattgaagcccatggtactggtactccagttggtgatccaattgaagttaaggccttgtccaagatcttctccaactctaacaacaaccagttgaacaacttctctaccgatggtaatgataacgatgatgatgatgacgataacacctctccagaaccattattgattggctcattcaagtccaacatcggtcatttggaatctgctgctggtattgcttctttgattaagtgttgcttgatgttgaagaacaggatgttggttccatccattaactgctctaatttgaacccatccattccattcgatcagtacaacatctccgttatcagagaaatcagacaattcccaaccgataagttggttaacatcggtatcaattctttcggtttcggtggttctaactgccatttgattattcaagagtacaacaacaacttcaagaacaactctaccatctgcaataacaacaacaacaacaataacaacatcgactacttgatcccaatctcctctaagactaagaagtccttggataagtacttgattttgatcaagaccaactccaactaccacaaggatatttctttcgatgacttcgtcaagttccaaatcaagtctaagcagtacaacttgtccaacagaatgactaccattgctaacgattggaactccttcattaagggttctaacgaattccacaacttgatcgaatctaaggatggtgaaggtggttcttcatcttctaacagaggtattgattccgccaatcaaatcaacactactactacctctaccatcaacgatatcgaacctttgttggttttcgttttctgtggtcaaggtccacaatggaatggtatgattaagaccttgtacaactccgagaacgttttcaagaacaccgttgatcatgttgacagcatcttgtacaagtacttcggttactccattttgaacgtcttgtctaagatcgatgataacgacgattccatcaaccatccaatagttgctcaaccatctttgttcttgttgcaaattggtttggtcgagttgtttaagtactggggtatctacccatctatctctgttggtcattctttcggtgaagtctcttcttattacttgtccggtatcatctctttggaaaccgcttgtaaaatcgtctacgtcagatcctctaatcagaacaaaactatgggttccggtaagatgttggttgtttctatgggttttaagcaatggaacgatcaattctctgctgaatggtccgatattgaaattgcttgttacaacgctccagattccatagttgttactggtaacgaagaaagattgaaagaattgtccatcaagttgtccgacgaatccaatcaaattttcaacaccttcttgaggtccccatgttcttttcattcttcccatcaagaagtcatcaagggttctatgttcgaagagttgtctaacttgcaatctactggtgaaaccgaaatccctttgttctctactgttactggtagacaagttttgtctggtcatgttactgctcaacacatctacgataatgttagagaaccagtcttgttccaaaagacgattgaatccattacctcctacatcaagtctcactacccatccaatcaaaaggttatctacgttgaaattgctccacacccaaccttgttttcattgatcaaaaagtccatcccatcctccaacaagaattcctcttctgttttgtgtccattgaacagaaaagaaaactccaacaactcctacaagaagttcgtttctcagttgtacttcaacggtgttaacgttgacttcaacttccagttgaactccatttgcgataacgttaacaacgatcaccatttgaacaacgtcaagcaaaactccttcaaagagactaccaattccttgccaagataccaatgggaacaagatgaatattggtccgaaccattgatctccagaaagaatagattggaaggtccaactacttccttgttgggtcatagaattatctacagcttcccagttttccaatccgttttggacttgcaatctgacaactacaaatacttgttggaccacttggttaacggtaagccagtttttccaggtgctggttatttggatatcatcatcgaattcttcgactaccaaaagcagcagttgaattcctctgattcctctaactcctacatcatcaacgttgacaagatccaattcttgaacccaattcacttgaccgaaaacaagttgcaaaccttgcaatcttctttcgaacctatcgttactaagaagtctgccttctctgttaacttcttcatcaaggataccgtcgaggatcaatctaaggttaagtctatgtctgacgaaacttggactaacacttgtaaggctaccatttccttggaacaacaacagccatctccatcttctactttgactttgtctaagaagcaagacttgcagatcttgagaaacagatgcgatattagcaagctagacaagtttgagttgtacgacaagatctctaagaatttgggcttgcagtacaactccttgtttcaagttgttgataccatcgaaactggtaaggattgctcttttgctactttgtctttgccagaagatactttgttcaccaccattttgaacccatgcttgttggataactgtttccatggtttgttgaccttgatcaacgaaaagggttctttcgttgtcgagtccatttcttctgtttctatctacttggagaacatcggttccttcaatcaaacttctgttggtaacgtccagttctacttgtacaccactatttctaaagccacctcctttagttctgaaggtacttgtaagttgttcaccaaggatggttccttgattttgtctatcggtaagttcatcatcaagtccaccaatccaaagtctactaagaccaacgaaactatcgaatctccattggacgaaaccttctctattgaatggcaatctaaggattctccaattccaaccccacaacaaatccaacaacaatctccattgaactctaacccatccttcattagatctaccatcttgaaggacatccagttcgaacaatactgctcctccattatccacaaagaattgatcaaccacgaaaagtacaagaaccagcaatccttcgatatcaactccttggaaaaccacttgaacgatgaccaattgatggaatccttgtccatctccaaagaatacttgagattcttcaccaggatcatctccatcattaagcaatacccaaagatcttgaacgaaaaagagctaaaagaattgaaagaaatcatcgaattgaagtacccatccgaagttcagttgttggaattcgaagttatcgagaaggtgtccatgattatcccaaagttgttgttcgaaaacgacaagcaatcttccatgaccttgttccaagataacttgttgaccaggttctactccaattctaactctaccagattctacttggaaagggtttccgaaatggtcttggaatctattagaccaatcgtcagagaaaagagggtgttcagaattttagagatcggtgctcgtacaggctctttgtctaatgttgttttgactaagttgaacacctacttgtccaccttgaattctaatggtggttctggttacaacatcatcattgagtacaccttcaccgatatttccgccaacttcattattggtgaaatccaagaaaccatgtgcaacttgtacccaaacgttactttcaagttctccgtcttggacttggagaaagagattattaactcctccgatttcttgatgggtgattacgatatagttttgatggcctacgttatccatgccgtttctaacattaagttctccatcgaacagttgtacaagttgttgtctccaagaggttggttgttgtgtattgaacctaagtccaacgttgtgttctccgatttggttttcggttgttttaatcagtggtggaactactacgatgatattagaactacccactgctccttgtctgaatctcaatggaatcagttgttgttgaaccagtccttgaacaacgaatcctcttcttcttctaactgttacggtggtttctccaacgtttcttttattggtggtgaaaaggatgtcgactcccattctttcatattgcactgccaaaaagaatccatctcccaaatgaagttagccaccactattaacaacggtttgtcatctggttccatcgttatcgttttgaactctcaacaattgaccaacatgaagtcctacccaaaggttattgagtatattcaagaggctacctctttgtgcaagaccattgaaattatcgattccaaggacgtcttgaactctaccaattcagttttggaaaagatccaaaagtccttgttggtgttctgtttgttgggttatgacttgttggagaacaactaccaagaacagtctttcgaatacgttaagttgttgaacttgatctctactaccgcctcttcatctaatgataagaaaccaccaaaggtcttgttgatcaccaagcaatctgaaagaatctccaggtctttctactccagatccttgattggtatttccagaacctctatgaacgagtacccaaatttgtccattacctctatcgatttggataccaacgactactcattgcagtctttgttgaagccaatcttcagcaactctaagttttccgacaacgagttcatcttcaaaaagggcttgatgttcgtgtccaggatctttaagaacaagcagttgctagaatcctccaacgcttttgaaactgactcttctaacttgtactgtaaggcctcttctgacttgtcttacaagtacgctattaagcagtctatgttgaccgaaaatcagatcgaaatcaaggttgaatgcgtcggtattaacttcaaggacaacctattctacaagggcttgttgccacaagaaattttcagaatgggtgacatctacaatccaccatatggtttggaatgctctggtgttattaccagaattggttctaacgtcaccgaatactcagttggtcaaaatgtttttggtttcgccagacattctttgggttctcatgttgttaccaacaaggatttggttatcttgaagccagataccatctcattttctgaagctgcttctatcccagttgtttactgtactgcttggtactccttgttcaacattggtcagttgtctaacgaagaatccatcctaattcattctgctactggtggtgtaggtttggcttctttgaatttgttgaaaatgaagaatcagcaacagcaaccattgaccaatgtttatgctactgttggctctaacgagaagaagaagttcttgatcgataacttcaacaacttgttcaaagaggacggcgaaaacattttctctaccagagacaaagaatactccaaccagttggaatccaagatcgatgttattttgaacaccttgtccggtgaattcgtcgaatctaatttcaagtccttgagatccttcggtagattgattgatttgtctgctactcacgtttacgccaatcaacaaattggtctaggtaacttcaagttcgaccacttgtattctgctgttgacttggaaagattgatcgacgaaaaacctaagttgttgcagtccatcttgcaaagaattaccaactctatcgtcaacggttccttggaaaaaattccaattaccatcttcccatccaccgaaactaaggatgctatcgaattattgtccaagagatcccatatcggtaaagttgttgtagattgcaccgatatctctaagtgtaatcctgttggtgatgtgatcaccaacttctctatgagattgccaaagccaaactaccagttgaatttgaactccaccttgttgattactggtcagtctggtttgtctatccctttgttgaattggttgttgtctaagtctggtggtaacgttaagaacgttgtcatcatttctaagtccaccatgaagtggaagttgcagactatgatttcccatttcgtttccggtttcggtatccattttaactacgttcaagtcgacatctccaactacgatgctttgtctgaagctattaagcaattgccatctgatttgccaccaatcacctctgtttttcatttggctgctatctacaacgatgttccaatggatcaagttaccatgtctaccgttgaatctgttcataaccctaaagttttgggtgccgttaacttgcatagaatctctgtttcttttggttggaagttgaaccacttcgtcttgttctcttctattactgctattaccggttacccagaccaatctatctacaattctgccaactctattttggacgctttgtccaactttagaaggtttatgggtttgccatccttctccattaacttgggtccaatgaaggatgaaggtaaggtttctaccaacaagagcatcaagaagctattcaagtctagaggtttgccaagcctatccttgaacaagttatttggtttgttggaggtcgtcatcaacaacccatctaatcatgttatcccatcccaattgatttgctccccaatcgatttcaagacctacatcgaatctttctcaactatgaggccaaagttgttacacttgcaacctaccatttccaagcagcaatcttctatcattaacgattctaccaaggcttcctccaacatttcattgcaagataagatcacctccaaggtgtctgatttgttgtccattccaatctccaagatcaacttcgatcatccattgaaacactacggcttggattctttgttgaccgttcaattcaaatcctggatcgacaaagaattcgaaaagaacttgttcacccatatccaattggccaccatctctattaactcattcttggaaaaggtgaacggcttgtctacaaacaataacaacaacaacaattccaacgtcaagtcctctccatccattgtcaaagaagaaatcgttaccttggacaaggatcaacaaccattgctattgaaagaacaccagcacattatcatctccccagatattagaatcaacaagccaaagagggaatccttgattagaaccccaatcttgaacaaattcaaccagatcaccgaatccattatcactccatctacaccatctttgtcccaatccgatgttttgaaaactccaccaatcaagtctttgaacaacactaagaactccagcttgattaacaccccaccaattcaatctgtccaacaacatcaaaagcaacaacaaaaggtccaagtcatccaacaacagcaacaaccattatccagattgtcctacaagagcaacaacaactctttcgttttgggtatcggtatttctgttccaggtgaacctatttcccaacaatccttgaaagactccatctccaatgacttttctgataaggctgaaactaacgagaaggtcaagagaatctttgagcaatctcaaatcaagaccagacacttggttagagattacactaagccagagaactccatcaagttcagacatttggaaaccattaccgatgtgaacaaccagttcaagaaagttgttccagatttggctcaacaagcctgtttgagagctttgaaagattggggtggtgataagggtgatattacccatatagtttctgttacctccaccggtattatcatcccagatgttaatttcaagttgatcgacttgttgggcttgaacaaggatgttgaaagagtgtctttgaacctaatgggttgtttggctggtttgagttctttgagaactgctgcttctttggctaaggcttctccaagaaatagaattttggttgtctgtaccgaagtctgctccttgcatttttctaatactgatggtggtgatcaaatggtcgcctcttctatttttgctgatggttctgctgcttacattattggttgtaacccaagaattgaagaaaccccattatacgaagtcatgtgctccattaacagatctttcccaaataccgaaaacgccatggtttgggatttggaaaaagaaggttggaacttgggtttggatgcttctattccaattgtcattggttctggtattgaagccttcgttgatactttgttggataaggctaagttgcaaacttccactgctatttctgctaaggattgcgaattcttgattcatactggtggcaagtccatcttgatgaacatcgaaaattccttgggtatcgacccaaagcaaactaagaatacttgggatgtttaccatgcctacggcaatatgtcatctgcctctgttattttcgttatggatcatgccagaaagtccaagtctttgccaacttactcaatttctttggcttttggtccaggtttggcttttgaaggttgtttcttgaagaacgtcgtctgaacagaagacgggagacactagcacacaactttaccaggcaaggtatttgacgctagcatgtgtccaattcagtgtcatttatgattttttgtagtaggatataaatatatacagcgctccaaatagtgcggttgccccaaaaacaccacggaacctcatctgttctcgtactttgttgtgacaaagtagctcactgccttattatcacattttcattatgcaacgcttcggaaaatacgatgttgaaaatgcctctagagatgaaaaacaatcgtaaaagggtcctgcgtaattgaaacatttgatcagtatgcagtggcacagaaacaaccaggaatactatagtcataggcaatacaaggtatatattggctatgcagacccctccagaaagtaccgacgtcaagttagatacacttaacgaacctagtgcacatttaattgagaaaaatgtggctcttcctaaggacatattccgttcgtacttgagttattggatctatgaaatcgctcgctatacaccagtcatgattttgtcgaagacatatgcccactttgggaaatagaaatggtcattttaagctcaagtgaagcgaaaaaaggaggtatactcctttacgcgtcacccaatctggataggcacgtcaaactcattaggtctcatcaagaactagtgtagaaatgacgcttgaactccgaactttaaacaaagttctgtttttgtttctgtttctgtttcctgttgctgtctctgtttctatttttttcgtatagctctatttcccttgtagataaacatatataagaatgctattatagaagcgtgtattttcctccccctagcttcaacctgtaattcccttcttagtaaagcgaactagaaccagtttaataggatataga

SEQ ID NO: 7 - DNA, 11637 bp, Artificial Sequence
  DiPKS-5
atgaacgctaatatatgggtggctgcttcagatggtaatttggaccgagtggaacatatcctccgcgagagtaaaggcgccatgaccccgcaatccaaggacattaacggctacactccaatgcatgctgccgccgcatacggccacctggatttgctgaagaaaatgtgcaatgagtacaatggagacattaatgtgttggacaacgacggcgataccccgttgcaccatgtggaggatgtggccactgccaggttgatcgtggaagagctgggtggagacttcactatcaggaatgtggagggccaaacgccatacgactcgttcgtcgagaacggtgaagatggtgagctaatcgagtacatgaggattaagtccggcgtggccgatgttcacggagtggacggcgtgcagggtgagggtgtcatcgacagcaaattgctggaagagttcaaggacaacgtgagatacaccttggaaaatgaccctgaggaaggagccgatgaggccactctgcaacgcaggaggcagttggaacagatcattacgggagacaacgctgaggaggagttggaaaggtacatccgtgctatggtcagagagcagatgctgggccagggctccatggcgggttccggggacgaaccagattccaagagaagaaaataacgaaagcaacaggcgcgttggacttttaattttcgaggaccgcgaatccttacatcacacccaatcccccacaagtgatcccccacacaccatagcttcaaaatgtttctactccttttttactcttccagattttctcggactccgcgcatcgccgtaccacttcaaaacacccaagcacagcatactaaatttcccctctttcttcctctagggtgtcgttaattacccgtactaaaggtttggaaaagaaaaaagagaccgcctcgtttctttttcttcgtcgaaaaaggcaataaaaatttttatcacgtttctttttcttgaaaatttttttttttgatttttttctctttcgatgacctcccattgatatttaagttaataaacggtcttcaatttctcaagtttcagtttcatttttcttgttctattacaactttttttacttcttgctcattagaaagaaagcatagcaatctaatctaagttttaataaacaatgaacaagaactccaaaatccagtccccaaactcttctgatgttgctgttattggtgttggttttagattcccaggtaactctaatgacccagaatctttgtggaacaacttgttggatggtttcgatgctattacccaagtcccaaaagaaagatgggctacttcttttagagagatgggtttgatcaagaacaagttcggtggtttcttgaaggattctgaatggaagaatttcgaccctttgttctttggtatcggtccaaaagaagctccattcattgatccacaacaaaggttgttgttgtccatcgtttgggaatctttggaagatgcttacatcagaccagatgaattgagaggttctaacactggtgttttcatcggtgtttctaacaacgattacaccaagttgggtttccaagacaactactctatttctccatacactatgaccggctctaactcttcattgaactccaacagaatttcctactgcttcgattttagaggtccatccattactgttgataccgcttgttcttcttccttggtttctgttaatttgggtgtccaatccatccaaatgggtgaatgtaagattgctatttgcggtggtgttaacgctttgtttgatccatctacatctgttgccttttccaagttgggtgttttgtctgaaaatggcagatgcaactcttttagtgatcaagcctctggttacgttagatctgaaggtgctggtgttgttgttttgaagtctttggaacaagctaagttggatggtgatagaatctacggtgttatcaagggtgtttcctctaatgaagatggtgcttctaatggtgacaagaactctttgactactccatcttgtgaagcccaatccattaacatttctaaggctatggaaaaggcctccttgtctccatctgatatctattacattgaagcccatggtactggtactccagttggtgatccaattgaagttaaggccttgtccaagatcttctccaactctaacaacaaccagttgaacaacttctctaccgatggtaatgataacgatgatgatgatgacgataacacctctccagaaccattattgattggctcattcaagtccaacatcggtcatttggaatctgctgctggtattgcttctttgattaagtgttgcttgatgttgaagaacaggatgttggttccatccattaactgctctaatttgaacccatccattccattcgatcagtacaacatctccgttatcagagaaatcagacaattcccaaccgataagttggttaacatcggtatcaattctttcggtttcggtggttctaactgccatttgattattcaagagtacaacaacaacttcaagaacaactctaccatctgcaataacaacaacaacaacaataacaacatcgactacttgatcccaatctcctctaagactaagaagtccttggataagtacttgattttgatcaagaccaactccaactaccacaaggatatttctttcgatgacttcgtcaagttccaaatcaagtctaagcagtacaacttgtccaacagaatgactaccattgctaacgattggaactccttcattaagggttctaacgaattccacaacttgatcgaatctaaggatggtgaaggtggttcttcatcttctaacagaggtattgattccgccaatcaaatcaacactactactacctctaccatcaacgatatcgaacctttgttggttttcgttttctgtggtcaaggtccacaatggaatggtatgattaagaccttgtacaactccgagaacgttttcaagaacaccgttgatcatgttgacagcatcttgtacaagtacttcggttactccattttgaacgtcttgtctaagatcgatgataacgacgattccatcaaccatccaatagttgctcaaccatctttgttcttgttgcaaattggtttggtcgagttgtttaagtactggggtatctacccatctatctctgttggtcattctttcggtgaagtctcttcttattacttgtccggtatcatctctttggaaaccgcttgtaaaatcgtctacgtcagatcctctaatcagaacaaaactatgggttccggtaagatgttggttgtttctatgggttttaagcaatggaacgatcaattctctgctgaatggtccgatattgaaattgcttgttacaacgctccagattccatagttgttactggtaacgaagaaagattgaaagaattgtccatcaagttgtccgacgaatccaatcaaattttcaacaccttcttgaggtccccatgttcttttcattcttcccatcaagaagtcatcaagggttctatgttcgaagagttgtctaacttgcaatctactggtgaaaccgaaatccctttgttctctactgttactggtagacaagttttgtctggtcatgttactgctcaacacatctacgataatgttagagaaccagtcttgttccaaaagacgattgaatccattacctcctacatcaagtctcactacccatccaatcaaaaggttatctacgttgaaattgctccacacccaaccttgttttcattgatcaaaaagtccatcccatcctccaacaagaattcctcttctgttttgtgtccattgaacagaaaagaaaactccaacaactcctacaagaagttcgtttctcagttgtacttcaacggtgttaacgttgacttcaacttccagttgaactccatttgcgataacgttaacaacgatcaccatttgaacaacgtcaagcaaaactccttcaaagagactaccaattccttgccaagataccaatgggaacaagatgaatattggtccgaaccattgatctccagaaagaatagattggaaggtccaactacttccttgttgggtcatagaattatctacagcttcccagttttccaatccgttttggacttgcaatctgacaactacaaatacttgttggaccacttggttaacggtaagccagtttttccaggtgctggttatttggatatcatcatcgaattcttcgactaccaaaagcagcagttgaattcctctgattcctctaactcctacatcatcaacgttgacaagatccaattcttgaacccaattcacttgaccgaaaacaagttgcaaaccttgcaatcttctttcgaacctatcgttactaagaagtctgccttctctgttaacttcttcatcaaggataccgtcgaggatcaatctaaggttaagtctatgtctgacgaaacttggactaacacttgtaaggctaccatttccttggaacaacaacagccatctccatcttctactttgactttgtctaagaagcaagacttgcagatcttgagaaacagatgcgatattagcaagctagacaagtttgagttgtacgacaagatctctaagaatttgggcttgcagtacaactccttgtttcaagttgttgataccatcgaaactggtaaggattgctcttttgctactttgtctttgccagaagatactttgttcaccaccattttgaacccatgcttgttggataactgtttccatggtttgttgaccttgatcaacgaaaagggttctttcgttgtcgagtccatttcttctgtttctatctacttggagaacatcggttccttcaatcaaacttctgttggtaacgtccagttctacttgtacaccactatttctaaagccacctcctttagttctgaaggtacttgtaagttgttcaccaaggatggttccttgattttgtctatcggtaagttcatcatcaagtccaccaatccaaagtctactaagaccaacgaaactatcgaatctccattggacgaaaccttctctattgaatggcaatctaaggattctccaattccaaccccacaacaaatccaacaacaatctccattgaactctaacccatccttcattagatctaccatcttgaaggacatccagttcgaacaatactgctcctccattatccacaaagaattgatcaaccacgaaaagtacaagaaccagcaatccttcgatatcaactccttggaaaaccacttgaacgatgaccaattgatggaatccttgtccatctccaaagaatacttgagattcttcaccaggatcatctccatcattaagcaatacccaaagatcttgaacgaaaaagagctaaaagaattgaaagaaatcatcgaattgaagtacccatccgaagttcagttgttggaattcgaagttatcgagaaggtgtccatgattatcccaaagttgttgttcgaaaacgacaagcaatcttccatgaccttgttccaagataacttgttgaccaggttctactccaattctaactctaccagattctacttggaaagggtttccgaaatggtcttggaatctattagaccaatcgtcagagaaaagagggtgttcagaattttagagatcggtgctcgtacaggctctttgtctaatgttgttttgactaagttgaacacctacttgtccaccttgaattctaatggtggttctggttacaacatcatcattgagtacaccttcaccgatatttccgccaacttcattattggtgaaatccaagaaaccatgtgcaacttgtacccaaacgttactttcaagttctccgtcttggacttggagaaagagattattaactcctccgatttcttgatgggtgattacgatatagttttgatggcctacgttatccatgccgtttctaacattaagttctccatcgaacagttgtacaagttgttgtctccaagaggttggttgttgtgtattgaacctaagtccaacgttgtgttctccgatttggttttcggttgttttaatcagtggtggaactactacgatgatattagaactacccactgctccttgtctgaatctcaatggaatcagttgttgttgaaccagtccttgaacaacgaatcctcttcttcttctaactgttacggtggtttctccaacgtttcttttattggtggtgaaaaggatgtcgactcccattctttcatattgcactgccaaaaagaatccatctcccaaatgaagttagccaccactattaacaacggtttgtcatctggttccatcgttatcgttttgaactctcaacaattgaccaacatgaagtcctacccaaaggttattgagtatattcaagaggctacctctttgtgcaagaccattgaaattatcgattccaaggacgtcttgaactctaccaattcagttttggaaaagatccaaaagtccttgttggtgttctgtttgttgggttatgacttgttggagaacaactaccaagaacagtctttcgaatacgttaagttgttgaacttgatctctactaccgcctcttcatctaatgataagaaaccaccaaaggtcttgttgatcaccaagcaatctgaaagaatctccaggtctttctactccagatccttgattggtatttccagaacctctatgaacgagtacccaaatttgtccattacctctatcgatttggataccaacgactactcattgcagtctttgttgaagccaatcttcagcaactctaagttttccgacaacgagttcatcttcaaaaagggcttgatgttcgtgtccaggatctttaagaacaagcagttgctagaatcctccaacgcttttgaaactgactcttctaacttgtactgtaaggcctcttctgacttgtcttacaagtacgctattaagcagtctatgttgaccgaaaatcagatcgaaatcaaggttgaatgcgtcggtattaacttcaaggacaacctattctacaagggcttgttgccacaagaaattttcagaatgggtgacatctacaatccaccatatggtttggaatgctctggtgttattaccagaattggttctaacgtcaccgaatactcagttggtcaaaatgtttttggtttcgccagacattctttgggttctcatgttgttaccaacaaggatttggttatcttgaagccagataccatctcattttctgaagctgcttctatcccagttgtttactgtactgcttggtactccttgttcaacattggtcagttgtctaacgaagaatccatcctaattcattctgctactggtggtgtaggtttggcttctttgaatttgttgaaaatgaagaatcagcaacagcaaccattgaccaatgtttatgctactgttggctctaacgagaagaagaagttcttgatcgataacttcaacaacttgttcaaagaggacggcgaaaacattttctctaccagagacaaagaatactccaaccagttggaatccaagatcgatgttattttgaacaccttgtccggtgaattcgtcgaatctaatttcaagtccttgagatccttcggtagattgattgatttgtctgctactcacgtttacgccaatcaacaaattggtctaggtaacttcaagttcgaccacttgtattctgctgttgacttggaaagattgatcgacgaaaaacctaagttgttgcagtccatcttgcaaagaattaccaactctatcgtcaacggttccttggaaaaaattccaattaccatcttcccatccaccgaaactaaggatgctatcgaattattgtccaagagatcccatatcggtaaagttgttgtagattgcaccgatatctctaagtgtaatcctgttggtgatgtgatcaccaacttctctatgagattgccaaagccaaactaccagttgaatttgaactccaccttgttgattactggtcagtctggtttgtctatccctttgttgaattggttgttgtctaagtctggtggtaacgttaagaacgttgtcatcatttctaagtccaccatgaagtggaagttgcagactatgatttcccatttcgtttccggtttcggtatccattttaactacgttcaagtcgacatctccaactacgatgctttgtctgaagctattaagcaattgccatctgatttgccaccaatcacctctgtttttcatttggctgctatctacaacgatgttccaatggatcaagttaccatgtctaccgttgaatctgttcataaccctaaagttttgggtgccgttaacttgcatagaatctctgtttcttttggttggaagttgaaccacttcgtcttgttctcttctattactgctattaccggttacccagaccaatctatctacaattctgccaactctattttggacgctttgtccaactttagaaggtttatgggtttgccatccttctccattaacttgggtccaatgaaggatgaaggtaaggtttctaccaacaagagcatcaagaagctattcaagtctagaggtttgccaagcctatccttgaacaagttatttggtttgttggaggtcgtcatcaacaacccatctaatcatgttatcccatcccaattgatttgctccccaatcgatttcaagacctacatcgaatctttctcaactatgaggccaaagttgttacacttgcaacctaccatttccaagcagcaatcttctatcattaacgattctaccaaggcttcctccaacatttcattgcaagataagatcacctccaaggtgtctgatttgttgtccattccaatctccaagatcaacttcgatcatccattgaaacactacggcttggattctttgttgaccgttcaattcaaatcctggatcgacaaagaattcgaaaagaacttgttcacccatatccaattggccaccatctctattaactcattcttggaaaaggtgaacggcttgtctacaaacaataacaacaacaacaattccaacgtcaagtcctctccatccattgtcaaagaagaaatcgttaccttggacaaggatcaacaaccattgctattgaaagaacaccagcacattatcatctccccagatattagaatcaacaagccaaagagggaatccttgattagaaccccaatcttgaacaaattcaaccagatcaccgaatccattatcactccatctacaccatctttgtcccaatccgatgttttgaaaactccaccaatcaagtctttgaacaacactaagaactccagcttgattaacaccccaccaattcaatctgtccaacaacatcaaaagcaacaacaaaaggtccaagtcatccaacaacagcaacaaccattatccagattgtcctacaagagcaacaacaactctttcgttttgggtatcggtatttctgttccaggtgaacctatttcccaacaatccttgaaagactccatctccaatgacttttctgataaggctgaaactaacgagaaggtcaagagaatctttgagcaatctcaaatcaagaccagacacttggttagagattacactaagccagagaactccatcaagttcagacatttggaaaccattaccgatgtgaacaaccagttcaagaaagttgttccagatttggctcaacaagcctgtttgagagctttgaaagattggggtggtgataagggtgatattacccatatagtttctgttacctccaccggtattatcatcccagatgttaatttcaagttgatcgacttgttgggcttgaacaaggatgttgaaagagtgtctttgaacctaatgggttgtttggctggtttgagttctttgagaactgctgcttctttggctaaggcttctccaagaaatagaattttggttgtctgtaccgaagtctgctccttgcatttttctaatactgatggtggtgatcaaatggtcgcctcttctatttttgctgatggttctgctgcttacattattggttgtaacccaagaattgaagaaaccccattatacgaagtcatgtgctccattaacagatctttcccaaataccgaaaacgccatggtttgggatttggaaaaagaaggttggaacttgggtttggatgcttctattccaattgtcattggttctggtattgaagccttcgttgatactttgttggataaggctaagttgcaaacttccactgctatttctgctaaggattgcgaattcttgattcatactggtggcaagtccatcttgatgaacatcgaaaattccttgggtatcgacccaaagcaaactaagaatacttgggatgtttaccatgcctacggcaatatgtcatctgcctctgttattttcgttatggatcatgccagaaagtccaagtctttgccaacttactcaatttctttggcttttggtccaggtttggcttttgaaggttgtttcttgaagaacgtcgtctgaacagaagacgggagacactagcacacaactttaccaggcaaggtatttgacgctagcatgtgtccaattcagtgtcatttatgattttttgtagtaggatataaatatatacagcgctccaaatagtgcggttgccccaaaaacaccacggaacctcatctgttctcgtactttgttgtgacaaagtagctcactgccttattatcacattttcattatgcaacgcttcggaaaatacgatgttgaaaatgcctctagagatgaaaaacaatcgtaaaagggtcctgcgtaattgaaacatttgatcagtatgcagtggcacagaaacaaccaggaatactatagtcataggcaatacaaggtatatattggctatgcagacccctccagaaagtaccgacgtcaagttagatacacttaacgaacctagtgcacatttaattgagaaaaatgtggctcttcctaaggacatattccgttcgtacttgagttattggatctatgaaatcgctcgctatacaccagtcatgattttgtctaatagacgttcttacaaggtaaaatttcaccgcgtttttaaatagaatgaaaaaaacgttgtagagtgaaagaaaagcaacaaatatacagttcacaaggcagcttcgtatagtaatacagcacgaaaaacagctcatagaaatggtaacacagaccaatccggtccctgttacatatccaacggatgcttatatccccacgtatctgcccgatgataaggtctccaatctggcagatttgaaaaaattgatagaaatggattccagactagatttgtatctgacaagaaggaggctggatacgtccatcaatttacctacaaacaccaagaccaaggaccatccccccaataaagagatgctgaggatttacgtctacaacactacggaaagcagccctcgcagcgattctggcaccccagcggactcaggcaagactacatggacactgagaatagaaggtaagcttctgcacgagtccgc

SEQ ID NO: 8 - DNA, 7114 bp, Artificial Sequence
  PDH
caccggagcttggatatgataaacgaaatattcttgaatcgtgagatcgcctgttttcaaaaccgttggaggcagaaacaattttgtcacaagatgggcattctaccccatccttgctgtattattgtagtctcgctttcttttatgctggacaaatgagactactgcacatttttatacgttcttggttttttttaaaggtgtggtttcggcattatcctgccgcacgtttcttggataattcatcctgattctctattttaaacgcttcagcctatcaggatttggttttgatacatactgcaagagtgtatctcgggaacagtcatttattccgcaacaaacttaattgcggaacgcgttaggcgatttctagcatatatcaaataccgttcgcgatttcttctgggttcgtctcttttcttttaaatacttattaacgtactcaaacaactacacttcgttgtatctcagaatgagatccctcagtatgacaatacatcattctaaacgttcgtaaaacacatatgaaacaactttataacaaagcgaacaaaatgggcaacatgagatgaaactccgcgtcccttagctgaactacccaaacgtacgaatgcctgaacaattagtttagatccgagattccgcgcttccatcatttagtataatccatattttatataatatataggataagtaacagcccgcgaaaaacaacaaataatcataaaaattttagaactagacatatcgagtttatcattatcaatactgccatttcaaagaatacgtaaataattaatagtagtgattttcctaactttatttagtcaaaaaattagccttttaattctgctgtaacccgtacatgcccaaaatagggggcgggttacacagaatatataacatcgtaggtgtctgggtgaacagtttattcctggcatccactaaatataatggagcccgctttttaagctggcatccagaaaaaaaaagaatcccagcaccaaaatattgttttcttcaccaaccatcagttcataggtccattctcttagcgcaactacagagaacaggggcacaaacaggcaaaaaacgggcacaacctcaatggagtgatgcaacctgcctggagtaaatgatgacacaaggcaattgacccacgcatgtatctatctcattttcttacaccttctattaccttctgctctctctgatttggaaaaagctgaaaaaaaaggttgaaaccagttccctgaaattattcccctacttgactaataagtatataaagacggtaggtattgattgtaattctgtaaatctatttcttaaacttcttaaattctacttttatagttagtcttttttttagttttaaaacaccaagaacttagtttcgactagaaaatttattataaaaggaagagaaataattaaacaatgactaagctacactttgacactgctgaaccagtcaagatcacacttccaaatggtttgacatacgagcaaccaaccggtctattcattaacaacaagtttatgaaagctcaagacggtaagacctatcccgtcgaagatccttccactgaaaacaccgtttgtgaggtctcttctgccaccactgaagatgttgaatatgctatcgaatgtgccgaccgtgctttccacgacactgaatgggctacccaagacccaagagaaagaggccgtctactaagtaagttggctgacgaattggaaagccaaattgacttggtttcttccattgaagctttggacaatggtaaaactttggccttagcccgtggggatgttaccattgcaatcaactgtctaagagatgctgctgcctatgccgacaaagtcaacggtagaacaatcaacaccggtgacggctacatgaacttcaccaccttagagccaatcggtgtctgtggtcaaattattccatggaactttccaataatgatgttggcttggaagatcgccccagcattggccatgggtaacgtctgtatcttgaaacccgctgctgtcacacctttaaatgccctatactttgcttctttatgtaagaaggttggtattccagctggtgtcgtcaacatcgttccaggtcctggtagaactgttggtgctgctttgaccaacgacccaagaatcagaaagctggcttttaccggttctacagaagtcggtaagagtgttgctgtcgactcttctgaatctaacttgaagaaaatcactttggaactaggtggtaagtccgcccatttggtctttgacgatgctaacattaagaagactttaccaaatctagtaaacggtattttcaagaacgctggtcaaatttgttcctctggttctagaatttacgttcaagaaggtatttacgacgaactattggctgctttcaaggcttacttggaaaccgaaatcaaagttggtaatccatttgacaaggctaacttccaaggtgctatcactaaccgtcaacaattcgacacaattatgaactacatcgatatcggtaagaaagaaggcgccaagatcttaactggtggcgaaaaagttggtgacaagggttacttcatcagaccaaccgttttctacgatgttaatgaagacatgagaattgttaaggaagaaatttttggaccagttgtcactgtcgcaaagttcaagactttagaagaaggtgtcgaaatggctaacagctctgaattcggtctaggttctatgggtatcgaaacagaatctttgagcacaggtttgaaggtggccaagatgttgaaggccggtaccgtctggatcaacacatacaacgattttgactccagagttccattcggtggtgttaagcaatctggttacggtagagaaatgggtgaagaagtctaccatgcatacactgaagtaaaagctgtcagaattaagttgtaaagacataaaactgaaacaacaccaattaataatagacttttggacttcttcgccagaggtttggtcaagtctccaatcaaggttgtcggcttgtctaccttgccagaaatttacgaaaagatggaaaagggtcaaatcgttggtagatacgttgttgacacttctaaataagcgaatttcttatgatttatgatttttattattaaataagttataaaaaaaataagtgtatacaaattttaaagtgactcttaggttttaaaacgaaaattcttattcttgagtaactctttcctgtaggtcaggttgctttctcaggtatagcatgaggtcgctcttattgaccacacctctaccggcatggcttaaataacatactcatcactaaacattcttaacaatcaaagcaacaggcgcgttggacttttaattttcgaggaccgcgaatccttacatcacacccaatcccccacaagtgatcccccacacaccatagcttcaaaatgtttctactccttttttactcttccagattttctcggactccgcgcatcgccgtaccacttcaaaacacccaagcacagcatactaaatttcccctctttcttcctctagggtgtcgttaattacccgtactaaaggtttggaaaagaaaaaagagaccgcctcgtttctttttcttcgtcgaaaaaggcaataaaaatttttatcacgtttctttttcttgaaaatttttttttttgatttttttctctttcgatgacctcccattgatatttaagttaataaacggtcttcaatttctcaagtttcagtttcatttttcttgttctattacaactttttttacttcttgctcattagaaagaaagcatagcaatctaatctaagttttaatacatctaccagtcaacagccaacaattaactaattaaacaatgtcccaaactcataagcacgctattccagctaatattgctgatagatgcttgatcaacccagaacagtacgaaactaagtacaagcaatccatcaacgatccagatactttttggggtgaacaaggtaagattttggattggattaccccataccaaaaggtcaagaatacttcttttgctccaggcaacgtttccattaagtggtatgaagatggtactttgaacttggctgctaactgtttggatagacacttgcaagaaaacggtgatagaaccgctattatttgggaaggtgatgatacctcccaatccaaacatatctcttacagagaattgcacagagatgtctgtagattcgctaacactttgttggatttgggcatcaaaaagggtgatgttgttgctatctatatgccaatggttcctgaagctgctgttgctatgttggcttgtgctagaattggtgctgttcattctgttattttcggtggtttttcaccagaagctgttgccggtagaattatcgattcttcatccagattggttatcaccgctgatgaaggtgttagagctggtagatctattccattgaaaaagaacgttgatgacgccttgaagaacccaaatgttacttctgttgaacacgtcatcgttttgaagagaactggttctgatatcgattggcaagagggtagagatttgtggtggagagatttgattgaaaaggcttctccagaacatcaaccagaagctatgaacgctgaagatcctttgtttatcttgtacacttctggttctactggtaagccaaaaggtgttttacacactactggtggttatttggtttacgctgctactactttcaagtacgttttcgattatcacccaggtgatatctattggtgtactgctgatgttggttgggttactggtcattcttatttgttgtatggtccattggcttgtggtgctactacattgatgtttgaaggtgttccaaattggccaactccagctagaatgtgtcaagttgttgacaaacaccaagtcaacatcttgtatactgctccaactgctattagagctttgatggctgaaggtgataaggctattgaaggtactgatagatcctccttgagaatcttgggttctgttggtgaacctattaaccctgaagcctgggaatggtattggaagaaaattggtaaagaaaagtgcccagttgttgatacttggtggcaaactgaaactggtggttttatgattactccattgccaggtgctattgaattgaaagctggttctgctactagaccattttttggtgttcaaccagctttggttgataacgaaggtcatccacaagaaggtgctactgaaggtaatttggttattactgattcttggccaggtcaagctagaactttgtttggtgatcacgaaagattcgaacagacttacttctctaccttcaagaacatgtacttctctggtgatggtgctagaagagatgaagatggttactattggattaccggtagagttgatgatgtcttgaatgtttctggtcacagattaggtactgccgaaattgaatctgctttggttgctcatccaaagattgctgaagctgcagttgttggtattccacatgctattaagggtcaagctatctacgcttacgttactttgaatcatggtgaagaaccatctccagaattatacgctgaagttagaaactgggtcagaaaagaaattggtccattagctaccccagatgttttacattggactgattctttgccaaagaccagatcaggtaagatcatgagaagaatcttgagaaagattgctgctggtgatacttctaacttgggtgatacttcaacattagctgatccaggtgttgttgaaaagcctttggaagaaaaacaagctattgccatgccatcctaataattaaatactattttcaaaattctacttaaaaataacagaagacgggagacactagcacacaactttaccaggcaaggtatttgacgctagcatgtgtccaattcagtgtcatttatgattttttgtagtaggatataaatatatacagcgctccaaatagtgcggttgccccaaaaacaccacggaacctcatctgttctcgtactttgttgtgacaaagtagctcactgccttattatcacattttcattatgcaacgcttcggaaaatacgatgttgaaaatgcctctagagatgaaaaacaatcgtaaaagggtcctgcgtaattgaaacatttgatcagtatgcagtggcacagaaacaaccaggaatactatagtcataggcaatacaaggtatatattggctatgcagacccctccagaaagtaccgacgtcaagttagatacacttaacgaacctagtgcacatttaattgagaaaaatgtggctcttcctaaggacatattccgttcgtacttgagttattggatctatgaaatcgctcgctatacaccagtcatgattttgtcattgcgaagactatactgatatatgaatttaaactagagcggaccaactatcatccgctaattactgacattaccaaatgagatctgtgaatgggcaagataaaaaacaaaaattgaaatgtttgacgttatgtaaaactattaattccttcgctttcggcggtcacagaatttgcgtgtagctgactcttgttcaatcaatatcatttgttactttatttgaaagtctgtattactgcgcctattgtcatccgtaccaaagaacgtcaaaaagaaacaagataatttttgtgcttacaccatttatagatcactgagcccagaatatcgctggagctcagtgtaagtggcatgaacacaactctgactgatcgcacatattgccgttatcataaatactagttgtacttgtcaatgcgacgaatggcatcatgcctattattacgttcctctttttccgtttcatgtttccagaatgctattgaatctaacacttcaattataaaaaagaataaatccgcaataattttaggctaattgttgtactgtcaagcgaacctaatggttaaaattcagaggaaccttcgacgtagtctgatcgctacttctatatcttatgttcccagtcaatcaaaagttgatactataatagctgccatttatacctgttagttatggcgatcgtttatcacg

SEQ ID NO: 9 - DNA, 3256 bp, Artificial Sequence
  Maf1
aatgatttaagcgtgcgtgaagataacactacaatccattttaaagcaacatccacattgagtgtatacaccacaaaggttttttcagggcgtttttctcgccactttatgttgaccaaaattattaatggaacttacaacgtttccaaaagttagttaaatacatacgtctatttactaagcaagaaatatatcatgacaagcccaaatattatattgttatgtttacaaaaaaaaaatggctatatacatcaagtctggaggctttttataacaagcaagtggggtaacttagacataagattgacttctttgaattcaacaaaaatacatacttttgatgatttcaatggtagaagcataaacaacaaataatcataaaaattttagaactagacataaagcaacaggcgcgttggacttttaattttcgaggaccgcgaatccttacatcacacccaatcccccacaagtgatcccccacacaccatagcttcaaaatgtttctactccttttttactcttccagattttctcggactccgcgcatcgccgtaccacttcaaaacacccaagcacagcatactaaatttcccctctttcttcctctagggtgtcgttaattacccgtactaaaggtttggaaaagaaaaaagagaccgcctcgtttctttttcttcgtcgaaaaaggcaataaaaatttttatcacgtttctttttcttgaaaatttttttttttgatttttttctctttcgatgacctcccattgatatttaagttaataaacggtcttcaatttctcaagtttcagtttcatttttcttgttctattacaactttttttacttcttgctcattagaaagaaagcatagcaatctaatctaagttttaatctagaaaatttattataaaaggaagagaaataattaaacaatgaaatttattgatgagctagatatagagagagtgaatcaaactctcaatttcgagacaaatgactgtaaaatcgtgggcagttgcgatattttcacaacaaaggcggttgcatcagatagaaaattatataaaactattgatcagcatttggatactattttacaggaaaatgagaattacaatgctacccttcagcaacagctagctgctcccgaaacaaaccaatcaccctgctcgtcgccattttattctaataggagggatagcaactctttttgggagcaaaagagaagaatatcttttagtgaatacaatagcaataataacactaacaacagtaatggcaatagcagtaataacaataactattctggacctaatggttcttctccagcaacttttcccaaaagtgccaagctaaatgaccaaaatttaaaagaattagtctcgaattacgattctggctctatgagctcatcgtctcttgattcttcttctaagaatgatgagaggataagaagaaggagcagtagcagtattagcagtttcaaaagtggtaaatcatcgaacaataattacagttctggtacagcaaccaacaatgttaacaaaagaagaaaatcttcgataaacgaaaggccaagcaatttaagtttgggtccgtttggtcccataaacgaaccgtcaagccgcaaaatatttgcttatctgattgctatcctcaacgcttcttatcctgaccatgatttttcatcggttgagccaacggattttgtcaaaacatcattgaaaacttttatttccaaatttgaaaacaccttatattctcttggtagacaaccagaggaatgggtctgggaggtaattaattctcacatgactctttctgattgcgtcctttttcaatattcaccttcaaactcttttttggaagatgagcctggctatctttggaatcttataggttttctttacaacaggaaaaggaaaagagtggcttacctttacttgatttgctcgcgtctaaattcgagtacaggcgaagtggaagatgccttggcaaaaaaacctcagggaaagcttataatagatgatggctcaaatgaatacgaaggagaatacgatttcacttatgatgagaatgtaatagatgataaatcagatcaagaagaatccctacagtagagacataaaactgaaacaacaccaattaataatagactttacagaagacgggagacactagcacacaactttaccaggcaaggtatttgacgctagcatgtgtccaattcagtgtcatttatgattttttgtagtaggatataaatatatacagcgctccaaatagtgcggttgccccaaaaacaccacggaacctcatctgttctcgtactttgttgtgacaaagtagctcactgccttattatcacattttcattatgcaacgcttcggaaaatacgatgttgaaaatgcctctagagatgaaaaacaatcgtaaaagggtcctgcgtaattgaaacatttgatcagtatgcagtggcacagaaacaaccaggaatactatagtcataggcaatacaaggtatatattggctatgcagacccctccagaaagtaccgacgtcaagttagatacacttaacgaacctagtgcacatttaattgagaaaaatgtggctcttcctaaggacatattccgttcgtacttgagttattggatctatgaaatcgctcgctatacaccagtcatgattttgtccttaaataacatactcatcactaaacattcttaacaatcagaaaacaacgcgtcatgaaaaagagttactgaaccttcagatcctacttattgtaatgcttcgcgacatccaatccatttaataatcaatttaaaactagagttggtagagttccttgttgaacgtgataacccaaaagcataatacgagtaatgtttcagtattgctattatatgtttacacaaggaaaacatataataacaaacctctaatccggtagtacttaagaaactatagtttctatgtacaaaaaggtaactatgtaattcttacatttacataacatatagaagggtccaataaacttactaaacttactaccttgttgtatataggctagatcgtaatccactacgtcaacataaaaaaaacttaaggagtttgaattttatgtacaaacagattgttaaaatataatataagattatggaaacgaacttgctctaaaaaaaatttaaagttttataaaatcctcgcactatcgctgttatacatgatgtccccaaagcgtgtac

SEQ ID NO: 10 - DNA, 4254 bp, Artificial Sequence
  Erg20K197E
aaaagctgccaacgtgaccttacgttctgataaataatcaccaaattatcaataattctaatagtttcttggaatttttcacatgtttgcagtgaataaaaaaaaacaaacgttaaaggtgatattgatcacgtgacaaatctgtaaaagtacggatactgtccttattactgcgatatacagtgtgaggtattctaagcggtatattcaccgtcctctacacatattttaaatactgatgaagtgacaagcaatatcattgagcattctttttttaatagtcgaagtcagcttcttctcgtcggttctaaacgaaacgccttgttgaaaaagaccgataaatagaggaagcaacggcaggaaatatatataaacgcatgtcgaaactaatactttatgatagattgttcttctatcagttttcattttaactttaaaaactcaaccaacaggtattggactgacataggcacaataaactcaaaaatattacgtagaaatggcataggccactagtggatctgatatcacctaataacttcgtatagcatacattatacgaagttatattaagggttctcgagagctcgttttcgacactggatggcggcgttagtatcgaatcgacagcagtatagcgaccagcattcacatacgattgacgcatgatattactttctgcgcacttaacttcgcatctgggcagatgatgtcgaggcgaaaaaaaatataaatcacgctaacatttgattaaaatagaacaactacaatataaaaaaactatacaaatgacaagttcttgaaaacaagaatctttttattgtcagtactgattagaaaaactcatcgagcatcaaatgaaactgcaatttattcatatcaggattatcaataccatatttttgaaaaagccgtttctgtaatgaaggagaaaactcaccgaggcagttccataggatggcaagatcctggtatcggtctgcgattccgactcgtccaacatcaatacaacctattaatttcccctcgtcaaaaataaggttatcaagtgagaaatcaccatgagtgacgactgaatccggtgagaatggcaaaagcttatgcatttctttccagacttgttcaacaggccagccattacgctcgtcatcaaaatcactcgcatcaaccaaaccgttattcattcgtgattgcgcctgagcgagacgaaatacgcgatcgctgttaaaaggacaattacaaacaggaatcgaatgcaaccggcgcaggaacactgccagcgcatcaacaatattttcacctgaatcaggatattcttctaatacctggaatgctgttttgccggggatcgcagtggtgagtaaccatgcatcatcaggagtacggataaaatgcttgatggtcggaagaggcataaattccgtcagccagtttagtctgaccatctcatctgtaacatcattggcaacgctacctttgccatgtttcagaaacaactctggcgcatcgggcttcccatacaatcgatagattgtcgcacctgattgcccgacattatcgcgagcccatttatacccatataaatcagcatccatgttggaatttaatcgcggcctcgaaacgtgagtcttttccttacccatggttgtttatgttcggatgtgatgtgagaactgtatcctagcaagattttaaaaggaagtatatgaaagaagaacctcagtggcaaatcctaaccttttatatttctctacaggggcgcggcgtggggacaattcaacgcgtctgtgaggggagcgtttccctgctcgcaggtctgcagcgaggagccgtaatttttgcttcgcgccgtgcggccatcaaaatgtatggatgcaaatgattatacatggggatgtatgggctaaatgtacgggcgacagtcacatcatgcccctgagctgcgcacgtcaagactgtcaaggagggtattctgggcctccatgtcgctggccgggtgacccggcggggacgaggcaagctaaacagatctctagacctaataacttcgtatagcatacattatacgaagttatattaagggttgtcgacctgcagcgtacgaagcttcagctggcaaattaaagccttcgagcgtcccaaaaccttctcaagcaaggttttcagtataatgttacatgcgtacacgcgtctgtacagaaaaaaaagaaaaatttgaaatataaataacgttcttaatactaacataactataaaaaaataaatagggacctagacttcaggttgtctaactccttccttttcggttagagcggatgtggggggagggcgtgaatgtaagcgtgacataactaattacatgatctatttgcttctcttgtaaactttgttcaagaacgcagttaagacatcagctttgaagccacgagactcatcgacctgagaaattttggccttcaaatccttggcaatagactcttcatattcgtggtatagctgttcaattttcaagtcattgaaaatctttttgcatttggcttctgcgactgagtccttcttaccgtaattttcgtctaaagtctttctttgttctgcggaagcaagttccaatgccttgttgattacccaagaacatttgttatcttggatatctgtaccgatcttaccgatctgttctggggtaccgaagcagtctaagtagtcatcttgaatttggaagtattcacccaatggaatcaagacatctctggcttgtttcaaatccttttcatccgtgataccggcaacgtacatggccaatgcgacaggcaagtagaaagaatagtaagcagtctcgaaagtaactatgaaggagtgcttctttagggagaacttactcaagtcgactttgtcttcaggtgcagtgattaagtccatcaattggcccaattcggtttggaaggtgacctcatggaacaattcggtgatatctatgtagtatttttcgtttctgaagtgagatttcaaaagcttgtagatagcagcctctaacatgaatgcgtcattgatggcaatttccccaacttcaggaaccttgtaccaacatggttggcctcttctggtaatggacttgtccatcatatcatcggcgaccaagaagtaagcctgcaacaactcaatgcaccaacctagaatggcaaccttttcgtattcttcttgccccaattgttcaacggtcttgttggagagaatagcatacgtgtccacaacggacaaacctctatttagcttaccgcctggagtgttgtagttcaatgagtgggcataccagtcacatgcttccttaggcataccgtaagccaaaagcgatgcgttcaattcctctactaatttagggaaaacgttcaagaatctctctctcctaatttctttttctgaagccattgttttttttagtttatgtatgtgttttttgtagttatagatttaagcaagaaaagaatacaaacaaaaaattgaaaaagattgatttagaattaaaaagaaaaatatttacgtaagaagggaaaatagtaaatgttgcaagttcactaaactcctaaattatgctgccctttatattccctgttacagcagccgagccaaaggtatataggctcctttgcattagcatgcgtaacaaaccacctgtcagtttcaaccgaggtggtatccgagagaattgtgtgattgctttaattaatttcggagaatctcacatgccactgaagattaaaaactggatgccagaaaaggggtgtccaggtgtaacatcaatagaggaagctgaaaagtcttagaacgggtaatcttccaccaacctgatgggttcctagatataatctcgaagggaataagtagggtgataccgcagaagtgtctgaatgtattaaggtcctcacagtttaaatcccgctcacactaacgtaggattattataactcaaaaaaatggcattattctaagtaagttaaatatccgtaatctttaaacagctagttagaactaacgctaatcgataaaacattagatttcaaactagataaggaccatgtataagaactatatacttccaatataatatagtataagctttaagataatatctctcgatctaccgttccacgtgactagtccaaggatttttttaagccaatgaaaatgaagaaatgcgcgatcggaaattacgggtagtacgagaaggaaacttgagccaccccccaaattttattcata

SEQ ID NO: 11 - DNA, 3503 bp, Artificial Sequence
  Erg1p:UB14-Erg20:deg
tgtgcacaaaggccataatattatgtctacagaatatactagatgtcctccctataggatatagtaatcctctaaatggaaccgatatttctacataataatattacgattattcctccttccgttttatatgtttcattatcctagcacactatcaatctttgcatttcagcttccattagatttgatgactatttctcaatctttatgttatctccttacgccgcatgtgataatatactgctagtatgactactagttgatagaagatagttgatttttactccaacaaaagtaacaatattatttagaactatagattccattttgtgcattcccatattctcgaggaaaacttttagtatattctgtagacataatattatcgcctttgtgaacaatagaatcccaacaattgtcgcaaatttaccaattttctagattgcagtcaccttttcaattaatcactagtgtttcacttgtaacattgtcgttgttgtttaacgtattctgtcccgtgccaactatgacaaaaatgcaatgatttcagcggttaaatacgaagcgcaacaagagttagcgaaaaataagtaccaccattctacgctaccattacttactgaaattagagacaactgttatctattggcagatgttcatacggggctttcaaatattgatgaaattatgtgatgtttagaagaagattcgaactgttttcagtagatttggtaactgtgcaaccataactcatgcctacgttcgggatttaatcttctcgcagtctgcaggcgccttgagatttgcgttcggcctaaacgtttgctccacaaacgtgaatggtatgaacatggacatgagcgtggttcagggcactctacgggatcgtggcgaatgggaatcgttctgcaagctcttctaccaaaccatcggcgaatttgcgtcgctttaatgcgatactgccgtagcgggccttcgtatagctcggccgagctcgtacaaaaggcaagcagtgtatcggacagagctgatataacacaatacgctcgtagtcgatgcatgccgtggctgctctcggtcgggtataagtcttagacaatagtcttacctcgcatgtataataaatcttttgtatttaatctattatatgtttctatgcttttttttcctattgttgtttgcttttccttttccttatttctttctagcttctaattttctttcttttttttttttttttcattgaaaattatatatatatatatatatcagaacaattgtccagtattgaacaatacaggttatttcgaacaattgaaaaaaaaaaatcacagaaaaacatatcgagaaaagggtcaaaacaatgcagattttcgtcaagactttgaccggtaaaaccataacattggaagttgaatcttccgataccatcgacaacgttaagtcgaaaattcaagacaaggaaggtatccctccagatcaacaaagattgatctttgccggtaagcagctagaagacggtagaacgctgtctgattacaacattcagaaggagtccaccttacatcttgtgctaaggctaagaggtggtttccacaaatctggtgcttggttgttgccagtttctttggttaagggttctggtgcttcagaaaaagaaattaggagagagagattcttgaacgttttccctaaattagtagaggaattgaacgcatcgcttttggcttacggtatgcctaaggaagcatgtgactggtatgcccactcattgaactacaacactccaggcggtaagctaaatagaggtttgtccgttgtggacacgtatgctattctctccaacaagaccgttgaacaattggggcaagaagaatacgaaaaggttgccattctaggttggtgcattgagttgttgcaggcttacttcttggtcgccgatgatatgatggacaagtccattaccagaagaggccaaccatgttggtacaaggttcctgaagttggggaaattgccatcaatgacgcattcatgttagaggctgctatctacaagcttttgaaatctcacttcagaaacgaaaaatactacatagatatcaccgaattgttccatgaggtcaccttccaaaccgaattgggccaattgatggacttaatcactgcacctgaagacaaagtcgacttgagtaagttctccctaaagaagcactccttcatagttactttcaagactgcttactattctttctacttgcctgtcgcattggccatgtacgttgccggtatcacggatgaaaaggatttgaaacaagccagagatgtcttgattccattgggtgaatacttccaaattcaagatgactacttagactgcttcggtaccccagaacagatcggtaagatcggtacagatatccaagataacaaatgttcttgggtaatcaacaaggcattggaacttgcttccgcagaacaaagaaagactttagacgaaaattacggtaagaaggactcagtcgcagaagccaaatgcaaaaagattttcaatgacttgaaaattgaacagctataccacgaatatgaagagtctattgccaaggatttgaaggccaaaatttctcaggtcgatgagtctcgtggcttcaaagctgatgtcttaactgcgttcttgaacaaagtttacaagagaagcaaatagtggacttcttcgccagaggtttggtcaagtctccaatcaaggttgtcggcttgtctaccttgccagaaatttacgaaaagatggaaaagggtcaaatcgttggtagatacgttgttgacacttctaaataagcgaatttcttatgatttatgatttttattattaaataagttataaaaaaaataagtgtatacaaattttaaagtgactcttaggttttaaaacgaaaattcttattcttgagtaactctttcctgtaggtcaggttgctttctcaggtatagcatgaggtcgctcttattgaccacacctctaccggcatggaatcgtccccaacaaaagtgggctctcaaaattcatcacatttaaatgcatataggaagagcaacagttggtttgcatctgatgttccttaaagatttcgacataatgtgcgaagtagataaaatgggtcatttattaatagttatttcattattaaccagttgtggtacaaatgcaactaaagaaaaaaactactaaactatccgggaaatgcgccttagattgcacttcttaattcttattttcgatttttatttttcctttgataatcataaagagaaacgacgatcatttctaaagccatttctgctagtataccgttaaataagaaaaataaagccaaatattataatttttctaatgtgaatccataaatatcaaagcatgcaaaaagggaaagaagtaatgtcttggatttatatagcgtatttgtctaaggggagccagctttggcgcgcctatcgagagaccgattaca

SEQ ID NO: 12 - DNA, 4843 bp, Artificial Sequence
  tHMGr-IDI
cgagatctttgtgttcggttacccggctcagatcctaacttcgtatgtttattcgtataagttactgttgtccacaggcaatactctgcagaaaattaaaacggcattaatgctaggacaaccagaattgttactactgtatgtgcgatagttgataactgcaacattatgcccggtatattctcaaaaaaccctattactgcatacgaagaaatcgctcgagtttatcattatcaatactgccatttcaaagaatacgtaaataattaatagtagtgattttcctaactttatttagtcaaaaaattagccttttaattctgctgtaacccgtacatgcccaaaatagggggcgggttacacagaatatataacatcgtaggtgtctgggtgaacagtttattcctggcatccactaaatataatggagcccgctttttaagctggcatccagaaaaaaaaagaatcccagcaccaaaatattgttttcttcaccaaccatcagttcataggtccattctcttagcgcaactacagagaacaggggcacaaacaggcaaaaaacgggcacaacctcaatggagtgatgcaacctgcctggagtaaatgatgacacaaggcaattgacccacgcatgtatctatctcattttcttacaccttctattaccttctgctctctctgatttggaaaaagctgaaaaaaaaggttgaaaccagttccctgaaattattcccctacttgactaataagtatataaagacggtaggtattgattgtaattctgtaaatctatttcttaaacttcttaaattctacttttatagttagtcttttttttagttttaaaacaccaagaacttagtttcgaaaacaatggttttaaccaataaaacagtcatttctggatcgaaagtcaaaagtttatcatctgcgcaatcgagctcatcaggaccttcatcatctagtgaggaagatgattcccgcgatattgaaagcttggataagaaaatacgtcctttagaagaattagaagcattattaagtagtggaaatacaaaacaattgaagaacaaagaggtcgctgccttggttattcacggtaagttacctttgtacgctttggagaaaaaattaggtgatactacgagagcggttgcggtacgtaggaaggctctttcaattttggcagaagctcctgtattagcatctgatcgtttaccatataaaaattatgactacgaccgcgtatttggcgcttgttgtgaaaatgttataggttacatgcctttgcccgttggtgttataggccccttggttatcgatggtacatcttatcatataccaatggcaactacagagggttgtttggtagcttctgccatgcgtggctgtaaggcaatcaatgctggcggtggtgcaacaactgttttaactaaggatggtatgacaagaggcccagtagtccgtttcccaactttgaaaagatctggtgcctgtaagatatggttagactcagaagagggacaaaacgcaattaaaaaagcttttaactctacatcaagatttgcacgtctgcaacatattcaaacttgtctagcaggagatttactcttcatgagatttagaacaactactggtgacgcaatgggtatgaatatgatttctaaaggtgtcgaatactcattaaagcaaatggtagaagagtatggctgggaagatatggaggttgtctccgtttctggtaactactgtaccgacaaaaaaccagctgccatcaactggatcgaaggtcgtggtaagagtgtcgtcgcagaagctactattcctggtgatgttgtcagaaaagtgttaaaaagtgatgtttccgcattggttgagttgaacattgctaagaatttggttggatctgcaatggctgggtctgttggtggatttaacgcacatgcagctaatttagtgacagctgttttcttggcattaggacaagatcctgcacaaaatgttgaaagttccaactgtataacattgatgaaagaagtggacggtgatttgagaatttccgtatccatgccatccatcgaagtaggtaccatcggtggtggtactgttctagaaccacaaggtgccatgttggacttattaggtgtaagaggcccgcatgctaccgctcctggtaccaacgcacgtcaattagcaagaatagttgcctgtgccgtcttggcaggtgaattatccttatgtgctgccctagcagccggccatttggttcaaagtcatatgacccacaacaggaaacctgctgaaccaacaaaacctaacaatttggacgccactgatataaatcgtttgaaagatgggtccgtcacctgcattaaatcctaatggacttcttcgccagaggtttggtcaagtctccaatcaaggttgtcggcttgtctaccttgccagaaatttacgaaaagatggaaaagggtcaaatcgttggtagatacgttgttgacacttctaaataagcgaatttcttatgatttatgatttttattattaaataagttataaaaaaaataagtgtatacaaattttaaagtgactcttaggttttaaaacgaaaattcttattcttgagtaactctttcctgtaggtcaggttgctttctcaggtatagcatgaggtcgctcttattgaccacacctctaccggcatgcaagcaacaggcgcgttggacttttaattttcgaggaccgcgaatccttacatcacacccaatcccccacaagtgatcccccacacaccatagcttcaaaatgtttctactccttttttactcttccagattttctcggactccgcgcatcgccgtaccacttcaaaacacccaagcacagcatactaaatttcccctctttcttcctctagggtgtcgttaattacccgtactaaaggtttggaaaagaaaaaagagaccgcctcgtttctttttcttcgtcgaaaaaggcaataaaaatttttatcacgtttctttttcttgaaaatttttttttttgatttttttctctttcgatgacctcccattgatatttaagttaataaacggtcttcaatttctcaagtttcagtttcatttttcttgttctattacaactttttttacttcttgctcattagaaagaaagcatagcaatctaatctaagttttaataaacaatgactgccgacaacaatagtatgccccatggtgcagtatctagttacgccaaattagtgcaaaaccaaacacctgaagacattttggaagagtttcctgaaattattccattacaacaaagacctaatacccgatctagtgagacgtcaaatgacgaaagcggagaaacatgtttttctggtcatgatgaggagcaaattaagttaatgaatgaaaattgtattgttttggattgggacgataatgctattggtgccggtaccaagaaagtttgtcatttaatggaaaatattgaaaagggtttactacatcgtgcattctccgtctttattttcaatgaacaaggtgaattacttttacaacaaagagccactgaaaaaataactttccctgatctttggactaacacatgctgctctcatccactatgtattgatgacgaattaggtttgaagggtaagctagacgataagattaagggcgctattactgcggcggtgagaaaactagatcatgaattaggtattccagaagatgaaactaagacaaggggtaagtttcactttttaaacagaatccattacatggcaccaagcaatgaaccatggggtgaacatgaaattgattacatcctattttataagatcaacgctaaagaaaacttgactgtcaacccaaacgtcaatgaagttagagacttcaaatgggtttcaccaaatgatttgaaaactatgtttgctgacccaagttacaagtttacgccttggtttaagattatttgcgagaattacttattcaactggtgggagcaattagatgacctttctgaagtggaaaatgacaggcaaattcatagaatgctataaacagaagacgggagacactagcacacaactttaccaggcaaggtatttgacgctagcatgtgtccaattcagtgtcatttatgattttttgtagtaggatataaatatatacagcgctccaaatagtgcggttgccccaaaaacaccacggaacctcatctgttctcgtactttgttgtgacaaagtagctcactgccttattatcacattttcattatgcaacgcttcggaaaatacgatgttgaaaatgcctctagagatgaaaaacaatcgtaaaagggtcctgcgtaattgaaacatttgatcagtatgcagtggcacagaaacaaccaggaatactatagtcataggcaatacaaggtatatattggctatgcagacccctccagaaagtaccgacgtcaagttagatacacttaacgaacctagtgcacatttaattgagaaaaatgtggctcttcctaaggacatattccgttcgtacttgagttattggatctatgaaatcgctcgctatacaccagtcatgattttgtcacactcgtatatgcatgttgttgaaactctgttacgctgaactaacaatcacacatgtagaggtcaccgggaaaagttgcgaccccatggaaggtcgatctcttcgtttggctttgcttggctggcggcattgcgcttcttcgcttatacccgtctcttgacgctcgagctcgttcattgagatacctttattcttgcacattttctggcttttttcgctactcgggtac

SEQ ID NO: 13 - DNA, 7673 bp, Artificial Sequence
  PGK1p: ACC1S659A, S1157A
caagtcgcagtcgaaattcaaccgctcattgccactctctctactgcttggtgaactaggctatacgctcaatcagcgccaagatatataagaagaacagcactcccagtcgtattctggcacagtatagcctagcacaatcactgtcacaattgttatcggttctacaattgttctgctctcttcaattttcctttccttattctactctttttatccctacgcacagatattataacatctgcataataggcatttgcaagaattactcgtgagtaaggaaagagtgaggaactatcgcatacctgcatttaaagatgccgatttgggcgcgaatcctttattttggcttcaccctcatactattatcagggccagaaaaaggaagtgtttccctccttcttgaattgatgttaccctcataaagcacgtggcctcttatcgagaaagaaattaccgtcgctcgtgatttgtttgcaaaaagaacaaaactgaaaaaacccagacacgctcgacttcctgtcttcctattgattgcagcttccaatttcgtcacacaacaaggtcctagcgacggctcacaggttttgtaacaagcaatcgaaggttctggaatggcgggaaagggtttagtaccacatgctatgatgcccactgtgatctccagagcaaagttcgttcgatcgtactgttactctctctctttcaaacagaattgtccgaatcgtgtgacaacaacagcctgttctcacacactcttttcttctaaccaagggggtggtttagtttagtagaacctcgtgaaacttacatttacatatatataaacttgcataaattggtcaatgcaagaaatacatatttggtcttttctaattcgtagtttttcaagttcttagatgctttctttttctcttttttacagatcatcaaggaagtaattatctactttttacaacaaatataaaacaatgagcgaagaaagcttattcgagtcttctccacagaagatggagtacgaaattacaaactactcagaaagacatacagaacttccaggtcatttcattggcctcaatacagtagataaactagaggagtccccgttaagggactttgttaagagtcacggtggtcacacggtcatatccaagatcctgatagcaaataatggtattgccgccgtgaaagaaattagatccgtcagaaaatgggcatacgagacgttcggcgatgacagaaccgtccaattcgtcgccatggccaccccagaagatctggaggccaacgcagaatatatccgtatggccgatcaatacattgaagtgccaggtggtactaataataacaactacgctaacgtagacttgatcgtagacatcgccgaaagagcagacgtagacgccgtatgggctggctggggtcacgcctccgagaatccactattgcctgaaaaattgtcccagtctaagaggaaagtcatctttattgggcctccaggtaacgccatgaggtctttaggtgataaaatctcctctaccattgtcgctcaaagtgctaaagtcccatgtattccatggtctggtaccggtgttgacaccgttcacgtggacgagaaaaccggtctggtctctgtcgacgatgacatctatcaaaagggttgttgtacctctcctgaagatggtttacaaaaggccaagcgtattggttttcctgtcatgattaaggcatccgaaggtggtggtggtaaaggtatcagacaagttgaacgtgaagaagatttcatcgctttataccaccaggcagccaacgaaattccaggctcccccattttcatcatgaagttggccggtagagcgcgtcacttggaagttcaactgctagcagatcagtacggtacaaatatttccttgttcggtagagactgttccgttcagagacgtcatcaaaaaattatcgaagaagcaccagttacaattgccaaggctgaaacatttcacgagatggaaaaggctgccgtcagactggggaaactagtcggttatgtctctgccggtaccgtggagtatctatattctcatgatgatggaaaattctactttttagaattgaacccaagattacaagtcgagcatccaacaacggaaatggtctccggtgttaacttacctgcagctcaattacaaatcgctatgggaatccctatgcatagaataagtgacattagaactttatatggtatgaatcctcattctgcctcagaaatcgatttcgaattcaaaactcaagatgccaccaagaaacaaagaagacctattccaaagggtcattgtaccgcttgtcgtatcacatcagaagatccaaacgatggattcaagccatcgggtggtactttgcatgaactaaacttccgttcttcctctaatgtttggggttacttctccgtgggtaacaatggtaatattcactccttttcggactctcagttcggccatatttttgcttttggtgaaaatagacaagcttccaggaaacacatggttgttgccctgaaggaattgtccattaggggtgatttcagaactactgtggaatacttgatcaaacttttggaaactgaagatttcgaggataacactattaccaccggttggttggacgatttgattactcataaaatgaccgctgaaaagcctgatccaactcttgccgtcatttgcggtgccgctacaaaggctttcttagcatctgaagaagcccgccacaagtatatcgaatccttacaaaagggacaagttctatctaaagacctactgcaaactatgttccctgtagattttatccatgagggtaaaagatacaagttcacagtcgctaaatcaggtaatgaccgctacacattatttatcaatggttctaaatgtgatatcatactgcgtcaactagctgatggtggtcttttgattgccataggcggtaaatcgcataccatctattggaaagaagaagttgctgctacaagattatccgttgactctatgactactttgttggaagttgaaaacgatccaacccagttgcgtactccatcccctggtaaattggttaaattcttggtggaaaatggtgaacacattatcaagggccaaccatatgcagaaattgaagttatgaaaatgcaaatgcctttggtttctcaagaaaatggtatcgtccagttattaaagcaacctggttctaccattgttgcaggtgatatcatggctattatgactcttgacgatccatccaaggtcaagcacgctctaccatttgaaggtatgctgccagattttggttctccagttatcgaaggaaccaaacctgcctataaattcaagtcattagtgtctactttggaaaacattttgaagggttatgacaaccaagttattatgaacgcttccttgcaacaattgatagaggttttgagaaatccaaaactgccttactcagaatggaaactacacatctctgctttacattcaagattgcctgctaagctagatgaacaaatggaagagttagttgcacgttctttgagacgtggtgctgttttcccagctagacaattaagtaaattgattgatatggccgtgaagaatcctgaatacaaccccgacaaattgctgggcgccgtcgtggaaccattggcggatattgctcataagtactctaacgggttagaagcccatgaacattctatatttgtccatttcttggaagaatattacgaagttgaaaagttattcaatggtccaaatgttcgtgaggaaaatatcattctgaaattgcgtgatgaaaaccctaaagatctagataaagttgcgctaactgttttgtctcattcgaaagtttcagcgaagaataacctgatcctagctatcttgaaacattatcaaccattgtgcaagttatcttctaaagtttctgccattttctctactcctctacaacatattgttgaactagaatctaaggctaccgctaaggtcgctctacaagcaagagaaattttgattcaaggcgctttaccttcggtcaaggaaagaactgaacaaattgaacatatcttaaaatcctctgttgtgaaggttgcctatggctcatccaatccaaagcgctctgaaccagatttgaatatcttgaaggacttgatcgattctaattacgttgtgttcgatgttttacttcaattcctaacccatcaagacccagttgtgactgctgcagctgctcaagtctatattcgtcgtgcttatcgtgcttacaccataggagatattagagttcacgaaggtgtcacagttccaattgttgaatggaaattccaactaccttcagctgcgttctccacctttccgactgtgaagtctaagatgggtatgaacagggctgttgctgtttcagatttgtcatatgttgcaaacagtcagtcatctccgttaagagaaggtattttgatggctgtggatcatttagatgatgttgatgaaattttgtcacaaagtttggaagttattcctcgtcaccaatcttcttctaacggacctgctcctgatcgttctggtagctccgcatcgttgagtaatgttgctaatgtttgtgttgcttctacagaaggtttcgaatctgaagaggaaattttggtaaggttgagagaaattttggatttgaataagcaggaattaatcaatgcttctatccgtcgtatcacatttatgttcggttttaaagatgggtcttatccaaagtattatacttttaacggtccaaattataacgaaaatgaaacaattcgtcacattgagccggctttggccttccaactggaattaggaagattgtccaacttcaacattaaaccaattttcactgataatagaaacatccatgtctacgaagctgttagtaagacttctccattggataagagattctttacaagaggtattattagaacgggtcatatccgtgatgacatttctattcaagaatatctgacttctgaagctaacagattgatgagtgatatattggataatttagaagtcaccgacacttcaaattctgatttgaatcatatcttcatcaacttcattgcggtgtttgatatctctccagaagatgtcgaagccgccttcggtggtttcttagaaagatttggtaagagattgttgagattgcgtgtttcttctgccgaaattagaatcatcatcaaagatcctcaaacaggtgccccagtaccattgcgtgccttgatcaataacgtttctggttatgttatcaaaacagaaatgtacaccgaagtcaagaacgcaaaaggtgaatgggtatttaagtctttgggtaaacctggatccatgcatttaagacctattgctactccttaccctgttaaggaatggttgcaaccaaaacgttataaggcacacttgatgggtaccacatatgtctatgacttcccagaattattccgccaagcatcgtcatcccaatggaaaaatttctctgcagatgttaagttaacagatgatttctttatttccaacgagttgattgaagatgaaaacggcgaattaactgaggtggaaagagaacctggtgccaacgctattggtatggttgcctttaagattactgtaaagactcctgaatatccaagaggccgtcaatttgttgttgttgctaacgatatcacattcaagatcggttcctttggtccacaagaagacgaattcttcaataaggttactgaatatgctagaaagcgtggaatcccaagaatttacttggctgcaaactcaggtgccagaattggtatggctgaagagattgttccactatttcaagttgcatggaatgatgctgccaatccggacaagggcttccaatacttatacttaacaagtgaaggtatggaaactttaaagaaatttgacaaagaaaattctgttctcactgaacgtactgttataaacggtgaagaaagatttgtcatcaagacaattattggttctgaagatgggttaggtgtcgaatgtctacgtggatctggtttaattgctggtgcaacgtcaagggcttaccacgatatcttcactatcaccttagtcacttgtagatccgtcggtatcggtgcttatttggttcgtttgggtcaaagagctattcaggtcgaaggccagccaattattttaactggtgctcctgcaatcaacaaaatgctgggtagagaagtttatacttctaacttacaattgggtggtactcaaatcatgtataacaacggtgtttcacatttgactgctgttgacgatttagctggtgtagagaagattgttgaatggatgtcttatgttccagccaagcgtaatatgccagttcctatcttggaaactaaagacacatgggatagaccagttgatttcactccaactaatgatgaaacttacgatgtaagatggatgattgaaggtcgtgagactgaaagtggatttgaatatggtttgtttgataaagggtctttctttgaaactttgtcaggatgggccaaaggtgttgtcgttggtagagcccgtcttggtggtattccactgggtgttattggtgttgaaacaagaactgtcgagaacttgattcctgctgatccagctaatccaaatagtgctgaaacattaattcaagaacctggtcaagtttggcatccaaactccgccttcaagactgctcaagctatcaatgactttaacaacggtgaacaattgccaatgatgattttggccaactggagaggtttctctggtggtcaacgtgatatgttcaacgaagtcttgaagtatggttcgtttattgttgacgcattggtggattacaaacaaccaattattatctatatcccacctaccggtgaactaagaggtggttcatgggttgttgtcgatccaactatcaacgctgaccaaatggaaatgtatgccgacgtcaacgctagagctggtgttttggaaccacaaggtatggttggtatcaagttccgtagagaaaaattgctggacaccatgaacagattggatgacaagtacagagaattgagatctcaattatccaacaagagtttggctccagaagtacatcagcaaatatccaagcaattagctgatcgtgagagagaactattgccaatttacggacaaatcagtcttcaatttgctgatttgcacgataggtcttcacgtatggtggccaagggtgttatttctaaggaactggaatggaccgaggcacgtcgtttcttcttctggagattgagaagaagattgaacgaagaatatttgattaaaaggttgagccatcaggtaggcgaagcatcaagattagaaaagatcgcaagaattagatcgtggtaccctgcttcagtggaccatgaagatgataggcaagtcgcaacatggattgaagaaaactacaaaactttggacgataaactaaagggtttgaaattagagtcattcgctcaagacttagctaaaaagatcagaagcgaccatgacaatgctattgatggattatctgaagttatcaagatgttatctaccgatgataaagaaaaattgttgaagactttgaaatga

SEQ ID NO: 14 - DNA, 2177 bp, Artificial Sequence
  OAC
ttagtagatgatagttgatttttattccaacattattgtactcagcaattgttgcgaaacagacaagattaagtatattattcaaggccttgcttacctagatgaaccattgagaaatatacatattgagcaatacctctaggtccgaagttccgtgcctacaccctttagtcagatttagattatatgagataagtggtattttgtggaccaagtttgtgattaatctgatatcaagttactttcttaacgacattaggacgccagggtagccagtattattcaagtccatagaacagcctgtataccttcacttcattaggtatattcttggttatgcgttatttaaatcctcatctgccgctgcttaaaaaaagcagctaaagtgttgcgtaggcacggattagaagccgccgagcgggtgacagccctccgaaggaagactctcctccgtgcgtcctcgtcttcaccggtcgcgttcctgaaacgcagatgtgcctcgcgccgcactgctccgaacaataaagattctacaatactagcttttatggttatgaagaggaaaaattggcagtaacctggccccacaaaccttcaaatgaacgaatcaaattaacaaccataggatgataatgcgattagttttttagccttatttctggggtaattaatcagcgaagcgatgatttttgatctattaacagatatataaatgcaaaaactgcataaccactttaactaatactttcaacattttcggtttgtattacttcttattcaaatgtaataaaagtatcaacaaaaaattgttaatatacctctatactttaacgtcaaggagatggccgtcaagcacttgatcgtcttaaagtttaaggacgagatcactgaagcccaaaaggaagaattcttcaaaacttacgttaacttggttaacatcattcctgctatgaaggacgtctactggggtaaggatgtcactcaaaaaaacaaggaagaaggttatacccacatcgttgaagtcaccttcgaatctgttgaaactattcaagactacatcattcacccagctcacgtcggtttcggtgatgtttacagatctttctgggaaaaattgttgatcttcgactacaccccaagaaagggctaaagtgcttttaactaagaattattagtcttttctgcttattttttcatcatagtttagaacactttatattaacgaatagtttatgaatctatttaggtttaaaaattgatacagttttataagttactttttcaaagactcgtgctgtctattgcataatgcactggaaggggaaaaaaaaggtgcacacgcgtggctttttcttgaatttgcagtttgaaaaataactacatggatgataagaaaacatggagtacagtcactttgagaaccttcaatcagctggtaacgtcttcgttaattggatactcaaaaaagatggatagcatgaatcacaagatggaaggaaatgcgggccacgaccacagtgatatgcatatgggagatggagatgataccttccgttaattcgggtttcaatcacttcgtttgtctatcgtatcgcagcctagtgaatatttaattctttcaataaaaaaggcttaaaatcaccatgaaaatcacaagaggaatctttcaacaagaacaatagtatacaatccatgaatgaaggagttcatatttgactagaactatacaaaggttttgtactgtttttactgtgagggtagcatctcatttatccagaatctcagaagggagaaacccaatcgctaaatcgatattatcacccagaagtttcaaataggcgattgtagaatatacacagggacaaccactcagtttatggcttcagtgcgcgcccagttctggaggaaagcattatcgaagtaataaaactttaaaaaagctctccgcaactaatgaggattgcagtatccagatacccttgttttctgccaaatgaacacttttactatgtcatataaacaaaaagtgccatttcttggtactgcttcagtcttaggaatggtcaatacgttattattacttaaatatacgattaataacatgctctgttgcgtatttagtaagtgtgtaaggaaactgtaatattacctaaccggtatcccacgtgtttcacgaa

SEQ ID NO: 15 - protein, 102 aa, Artificial Sequence
  csOAC
MAVKHLIVLKFKDEITEAQKEEFFKTYVNLVNIIPAMKDVYWGKDVTQKNKEEGYTHIVEVTFESVETIQDYIIHPAHVGFGDVYRSFWEKLLIFDYTPRKG

SEQ ID NO: 16 - protein, 3147 aa, Artificial Sequence
  DiPKSG1516R
MNKNSKIQSPNSSDVAVIGVGFRFPGNSNDPESLWNNLLDGFDAITQVPKERWATSFREMGLIKNKFGGFLKDSEWKNFDPLFFGIGPKEAPFIDPQQRLLLSIVWESLEDAYIRPDELRGSNTGVFIGVSNNDYTKLGFQDNYSISPYTMTGSNSSLNSNRISYCFDFRGPSITVDTACSSSLVSVNLGVQSIQMGECKIAICGGVNALFDPSTSVAFSKLGVLSENGRCNSFSDQASGYVRSEGAGVVVLKSLEQAKLDGDRIYGVIKGVSSNEDGASNGDKNSLTTPSCEAQSINISKAMEKASLSPSDIYYIEAHGTGTPVGDPIEVKALSKIFSNSNNNQLNNFSTDGNDNDDDDDDNTSPEPLLIGSFKSNIGHLESAAGIASLIKCCLMLKNRMLVPSINCSNLNPSIPFDQYNISVIREIRQFPTDKLVNIGINSFGFGGSNCHLIIQEYNNNFKNNSTICNNNNNNNNNIDYLIPISSKTKKSLDKYLILIKTNSNYHKDISFDDFVKFQIKSKQYNLSNRMTTIANDWNSFIKGSNEFHNLIESKDGEGGSSSSNRGIDSANQINTTTTSTINDIEPLLVFVFCGQGPQWNGMIKTLYNSENVFKNTVDHVDSILYKYFGYSILNVLSKIDDNDDSINHPIVAQPSLFLLQIGLVELFKYWGIYPSISVGHSFGEVSSYYLSGIISLETACKIVYVRSSNQNKTMGSGKMLVVSMGFKQWNDQFSAEWSDIEIACYNAPDSIVVTGNEERLKELSIKLSDESNQIFNTFLRSPCSFHSSHQEVIKGSMFEELSNLQSTGETEIPLFSTVTGRQVLSGHVTAQHIYDNVREPVLFQKTIESITSYIKSHYPSNQKVIYVEIAPHPTLFSLIKKSIPSSNKNSSSVLCPLNRKENSNNSYKKFVSQLYFNGVNVDFNFQLNSICDNVNNDHHLNNVKQNSFKETTNSLPRYQWEQDEYWSEPLISRKNRLEGPTTSLLGHRIIYSFPVFQSVLDLQSDNYKYLLDHLVNGKPVFPGAGYLDIIIEFFDYQKQQLNSSDSSNSYIINVDKIQFLNPIHLTENKLQTLQSSFEPIVTKKSAFSVNFFIKDTVEDQSKVKSMSDETWTNTCKATISLEQQQPSPSSTLTLSKKQDLQILRNRCDISKLDKFELYDKISKNLGLQYNSLFQVVDTIETGKDCSFATLSLPEDTLFTTILNPCLLDNCFHGLLTLINEKGSFVVESISSVSIYLENIGSFNQTSVGNVQFYLYTTISKATSFSSEGTCKLFTKDGSLILSIGKFIIKSTNPKSTKTNETIESPLDETFSIEWQSKDSPIPTPQQIQQQSPLNSNPSFIRSTILKDIQFEQYCSSIIHKELINHEKYKNQQSFDINSLENHLNDDQLMESLSISKEYLRFFTRIISIIKQYPKILNEKELKELKEIIELKYPSEVQLLEFEVIEKVSMIIPKLLFENDKQSSMTLFQDNLLTRFYSNSNSTRFYLERVSEMVLESIRPIVREKRVFRILEIGARTGSLSNVVLTKLNTYLSTLNSNGGSGYNIIIEYTFTDISANFIIGEIQETMCNLYPNVTFKFSVLDLEKEIINSSDFLMGDYDIVLMAYVIHAVSNIKFSIEQLYKLLSPRGWLLCIEPKSNVVFSDLVFGCFNQWWNYYDDIRTTHCSLSESQWNQLLLNQSLNNESSSSSNCYGGFSNVSFIGGEKDVDSHSFILHCQKESISQMKLATTINNGLSSGSIVIVLNSQQLTNMKSYPKVIEYIQEATSLCKTIEIIDSKDVLNSTNSVLEKIQKSLLVFCLLGYDLLENNYQEQSFEYVKLLNLISTTASSSNDKKPPKVLLITKQSERISRSFYSRSLIGISRTSMNEYPNLSITSIDLDTNDYSLQSLLKPIFSNSKFSDNEFIFKKGLMFVSRIFKNKQLLESSNAFETDSSNLYCKASSDLSYKYAIKQSMLTENQIEIKVECVGINFKDNLFYKGLLPQEIFRMGDIYNPPYGLECSGVITRIGSNVTEYSVGQNVFGFARHSLGSHVVTNKDLVILKPDTISFSEAASIPVVYCTAWYSLFNIGQLSNEESILIHSATGGVGLASLNLLKMKNQQQQPLTNVYATVGSNEKKKFLIDNFNNLFKEDGENIFSTRDKEYSNQLESKIDVILNTLSGEFVESNFKSLRSFGRLIDLSATHVYANQQIGLGNFKFDHLYSAVDLERLIDEKPKLLQSILQRITNSIVNGSLEKIPITIFPSTETKDAIELLSKRSHIGKVVVDCTDISKCNPVGDVITNFSMRLPKPNYQLNLNSTLLITGQSGLSIPLLNWLLSKSGGNVKNVVIISKSTMKWKLQTMISHFVSGFGIHFNYVQVDISNYDALSEAIKQLPSDLPPITSVFHLAAIYNDVPMDQVTMSTVESVHNPKVLGAVNLHRISVSFGWKLNHFVLFSSITAITGYPDQSIYNSANSILDALSNFRRFMGLPSFSINLGPMKDEGKVSTNKSIKKLFKSRGLPSLSLNKLFGLLEVVINNPSNHVIPSQLICSPIDFKTYIESFSTMRPKLLHLQPTISKQQSSIINDSTKASSNISLQDKITSKVSDLLSIPISKINFDHPLKHYGLDSLLTVQFKSWIDKEFEKNLFTHIQLATISINSFLEKVNGLSTNNNNNNNSNVKSSPSIVKEEIVTLDKDQQPLLLKEHQHIIISPDIRINKPKRESLIRTPILNKFNQITESIITPSTPSLSQSDVLKTPPIKSLNNTKNSSLINTPPIQSVQQHQKQQQKVQVIQQQQQPLSRLSYKSNNNSFVLGIGISVPGEPISQQSLKDSISNDFSDKAETNEKVKRIFEQSQIKTRHLVRDYTKPENSIKFRHLETITDVNNQFKKVVPDLAQQACLRALKDWGGDKGDITHIVSVTSTGIIIPDVNFKLIDLLGLNKDVERVSLNLMGCLAGLSSLRTAASLAKASPRNRILVVCTEVCSLHFSNTDGGDQMVASSIFADGSAAYIIGCNPRIEETPLYEVMCSINRSFPNTENAMVWDLEKEGWNLGLDASIPIVIGSGIEAFVDTLLDKAKLQTSTAISAKDCEFLIHTGGKSILMNIENSLGIDPKQTKNTWDVYHAYGNMSSASVIFVMDHARKSKSLPTYSISLAFGPGLAFEGCFLKNVV

SEQ ID NO: 17 - DNA, 6841 bp, Artificial Sequence
  PLAS250
atatacctctatactttaacgtcaaggagaaaaaaccccggatcggactactagcagctgtaatacgactcactatagggaatattaagcttaaacaatgaacttgaagtacaagcactctttgaagaacaccttcggtgaaagaaagaccatcatcagatctaagttgttggagtcccattcttctgaagattggcatttgtctgaccccaagaaagaaaatggtgttgttggtaaaacccagaggggtattttcaaaaagtgggatattttgtgcaggttcgttcacccatatatcgttatggctactattatcggtgtgacctctttttctttgttgccattggaatctgctgccgatttgtctttgccatttttggttggtgtcctgaaaactttggttccatacgttttgttgaacatctacaccggtggtattaacgccttgtacgatattgaaatcgacaaggttaacaagccatacagaccattggttactggtgaattgtctattaagtctgccaccgttatagtttctactgctttggttacttctttggccatgggtattatgtctcaatctccacctttgttgtatggtttggttgctgtttttttgggtacttccgcttactctatcaagttgccattattgagatggaagaacaacccattcttgaccgctgttgctattttagttggtagaggtgttacccacgtttcctattatgttcatacccaagaatacgtcttgggtagaccatttgttttgaccagatctttcgttttcgctatcgccattatgtctttgttcgctgttacattcgctttgttgaaggatgttccagatgttgatggtgatagagaatctggtgttcaatccttctgtattttggccggtaaagaaaaggttttctggttgggtatttccatcttgttgatgggttatggttctgctatggttgttggtgcttcttcttcttgtttgaccaacaaattggttaccgttttgggtcatgctgctttggcttcatctttgtggttgagagcacaatctgttgacttggactctaaagaatctacctcctccttgtacatgttcgtttggaagttgtactacgtcgaacatttgttgatccacttcgtcagatgactcgagcatgcatctagagggccgcatcatgtaattagttatgtcacgcttacattcacgccctccccccacatccgctctaaccgaaaaggaaggagttagacaacctgaagtctaggtccctatttatttttttatagttatgttagtattaagaacgttatttatatttcaaatttttcttttttttctgtacagacgcgtgtacgcatgtaacattatactgaaaaccttgcttgagaaggttttgggacgctcgaaggctttaatttgcggccctgcattaatgaatcggccaacgcgcggggagaggcggtttgcgtattgggcgctcttccgcttcctcgctcactgactcgctgcgctcggtcgttcggctgcggcgagcggtatcagctcactcaaaggcggtaatacggttatccacagaatcaggggataacgcaggaaagaacatgtgagcaaaaggccagcaaaagcccaggaaccgtaaaaaggccgcgttgctggcgtttttccataggctccgcccccctgacgagcatcacaaaaatcgacgctcaagtcagaggtggcgaaacccgacaggactataaagataccaggcgtttccccctggaagctccctcgtgcgctctcctgttccgaccctgccgcttaccggatacctgtccgcctttctcccttcgggaagcgtggcgctttctcatagctcacgctgtaggtatctcagttcggtgtaggtcgttcgctccaagctgggctgtgtgcacgaaccccccgttcagcccgaccgctgcgccttatccggtaactatcgtcttgagtccaacccggtaagacacgacttatcgccactggcagcagccactggtaacaggattagcagagcgaggtatgtaggcggtgctacagagttcttgaagtggtggcctaactacggctacactagaaggacagtatttggtatctgcgctctgctgaagccagttaccttcggaaaaagagttggtagctcttgatccggcaaacaaaccaccgctggtagcggtggtttttttgtttgcaagcagcagattacgcgcagaaaaaaaggatctcaagaagatcctttgatcttttctacggggtctgacgctcagtggaacgaaaactcacgttaagggattttggtcatgagattatcaaaaaggatcttcacctagatccttttaaattaaaaatgaagttttaaatcaatctaaagtatatatgagtaaacttggtctgacagttaccaatgcttaatcagtgaggcacctatctcagcgatctgtctatttcgttcatccatagttgcctgactccccgtcgtgtagataactacgatacgggagcgcttaccatctggccccagtgctgcaatgataccgcgagacccacgctcaccggctccagatttatcagcaataaaccagccagccggaagggccgagcgcagaagtggtcctgcaactttatccgcctccattcagtctattaattgttgccgggaagctagagtaagtagttcgccagttaatagtttgcgcaacgttgttggcattgctacaggcatcgtggtgtcactctcgtcgtttggtatggcttcattcagctccggttcccaacgatcaaggcgagttacatgatcccccatgttgtgcaaaaaagcggttagctccttcggtcctccgatcgttgtcagaagtaagttggccgcagtgttatcactcatggttatggcagcactgcataattctcttactgtcatgccatccgtaagatgcttttctgtgactggtgagtactcaaccaagtcattctgagaatagtgtatgcggcgaccgagttgctcttgcccggcgtcaatacgggataatagtgtatcacatagcagaactttaaaagtgctcatcattggaaaacgttcttcggggcgaaaactctcaaggatcttaccgctgttgagatccagttcgatgtaacccactcgtgcacccaactgatcttcagcatcttttactttcaccagcgtttctgggtgagcaaaaacaggaaggcaaaatgccgcaaaaaagggaataagggcgacacggaaatgttgaatactcatactcttcctttttcaatgggtaataactgatataattaaattgaagctctaatttgtgagtttagtatacatgcatttacttataatacagttttttagttttgctggccgcatcttctcaaatatgcttcccagcctgcttttctgtaacgttcaccctctaccttagcatcccttccctttgcaaatagtcctcttccaacaataataatgtcagatcctgtagagaccacatcatccacggttctatactgttgacccaatgcgtctcccttgtcatctaaacccacaccgggtgtcataatcaaccaatcgtaaccttcatctcttccacccatgtctctttgagcaataaagccgataacaaaatctttgtcgctcttcgcaatgtcaacagtacccttagtatattctccagtagatagggagcccttgcatgacaattctgctaacatcaaaaggcctctaggttcctttgttacttcttctgccgcctgcttcaaaccgctaacaatacctgggcccaccacaccgtgtgcattcgtaatgtctgcccattctgctattctgtatacacccgcagagtactgcaatttgactgtattaccaatgtcagcaaattttctgtcttcgaagagtaaaaaattgtacttggcggataatgcctttagcggcttaactgtgccctccatggaaaaatcagtcaagatatccacatgtgtttttagtaaacaaattttgggacctaatgcttcaactaactccagtaattccttggtggtacgaacatccaatgaagcacacaagtttgtttgcttttcgtgcatgatattaaatagcttggcagcaacaggactaggatgagtagcagcacgttccttatatgtagctttcgacatgatttatcttcgtttcctgcaggtttttgttctgtgcagttgggttaagaatactgggcaatttcatgtttcttcaacactacatatgcgtatatataccaatctaagtctgtgctccttccttcgttcttccttctgttcggagattaccgaatcaaaaaaatttcaaagaaaccgaaatcaaaaaaaagaataaaaaaaaaatgatgaattgaattgaaaagctagcttatcgatgataagctgtcaaagatgagaattaattccacggactatagactatactagatactccgtctactgtacgatacacttccgctcaggtccttgtcctttaacgaggccttaccactcttttgttactctattgatccagctcagcaaaggcagtgtgatctaagattctatcttcgcgatgtagtaaaactagctagaccgagaaagagactagaaatgcaaaaggcacttctacaatggctgccatcattattatccgatgtgacgctgcagcttctcaatgatattcgaatacgctttgaggagatacagcctaatatccgacaaactgttttacagatttacgatcgtacttgttacccatcattgaattttgaacatccgaacctgggagttttccctgaaacagatagtatatttgaacctgtataataatatatagtctagcgctttacggaagacaatgtatgtatttcggttcctggagaaactattgcatctattgcataggtaatcttgcacgtcgcatccccggttcattttctgcgtttccatcttgcacttcaatagcatatctttgttaacgaagcatctgtgcttcattttgtagaacaaaaatgcaacgcgagagcgctaatttttcaaacaaagaatctgagctgcatttttacagaacagaaatgcaacgcgaaagcgctattttaccaacgaagaatctgtgcttcatttttgtaaaacaaaaatgcaacgcgacgagagcgctaatttttcaaacaaagaatctgagctgcatttttacagaacagaaatgcaacgcgagagcgctattttaccaacaaagaatctatacttcttttttgttctacaaaaatgcatcccgagagcgctatttttctaacaaagcatcttagattactttttttctcctttgtgcgctctataatgcagtctcttgataactttttgcactgtaggtccgttaaggttagaagaaggctactttggtgtctattttctcttccataaaaaaagcctgactccacttcccgcgtttactgattactagcgaagctgcgggtgcattttttcaagataaaggcatccccgattatattctataccgatgtggattgcgcatactttgtgaacagaaagtgatagcgttgatgattcttcattggtcagaaaattatgaacggtttcttctattttgtctctatatactacgtataggaaatgtttacattttcgtattgttttcgattcactctatgaatagttcttactacaatttttttgtctaaagagtaatactagagataaacataaaaaatgtagaggtcgagtttagatgcaagttcaaggagcgaaaggtggatgggtaggttatatagggatatagcacagagatatatagcaaagagatacttttgagcaatgtttgtggaagcggtattcgcaatgggaagctccaccccggttgataatcagaaaagccccaaaaacaggaagattgtataagcaaatatttaaattgtaaacgttaatattttgttaaaattcgcgttaaatttttgttaaatcagctcattttttaacgaatagcccgaaatcggcaaaatcccttataaatcaaaagaatagaccgagatagggttgagtgttgttccagtttccaacaagagtccactattaaagaacgtggactccaacgtcaaagggcgaaaaagggtctatcagggcgatggcccactacgtgaaccatcaccctaatcaagttttttggggtcgaggtgccgtaaagcagtaaatcggaagggtaaacggatgcccccatttagagcttgacggggaaagccggcgaacgtggcgagaaaggaagggaagaaagcgaaaggagcgggggctagggcggtgggaagtgtaggggtcacgctgggcgtaaccaccacacccgccgcgcttaatggggcgctacagggcgcgtggggatgatccactagtacggattagaagccgccgagcgggtgacagccctccgaaggaagactctcctccgtgcgtcctcgtcttcaccggtcgcgttcctgaaacgcagatgtgcctcgcgccgcactgctccgaacaataaagattctacaatactagcttttatggttatgaagaggaaaaattggcagtaacctggccccacaaaccttcaaatgaacgaatcaaattaacaaccataggatgataatgcgattagttttttagccttatttctggggtaattaatcagcgaagcgatgatttttgatctattaacagatatataaatgcaaaaactgcataaccactttaactaatactttcaacattttcggtttgtattacttcttattcaaatgtaataaaagtatcaacaaaaaattgtta

SEQ ID NO: 18 - DNA, 8980 bp, Artificial Sequence
  PLAS36
gtcggatgggcggtgatcactgatgaatataaggttccgtctaaaaagttcaaggttctgggaaatacagaccgccacagtatcaaaaaaaatcttataggggctcttttatttgacagtggagagacagcggaagcgactcgtctcaaacggacagctcgtagaaggtatacacgtcggaagaatcgtatttgttatctacaggagattttttcaaatgagatggcgaaagtagatgatagtttctttcatcgacttgaagagtcttttttggtggaagaagacaagaagcatgaacgtcatcctatttttggaaatatagtagatgaagttgcttatcatgagaaatatccaactatctatcatctgcgaaaaaaattggtagattctactgataaagcggatttgcgcttaatctatttggccttagcgcatatgattaagtttcgtggtcattttttgattgagggagatttaaatcctgataatagtgatgtggacaaactatttatccagttggtacaaacctacaatcaattatttgaagaaaaccctattaacgcaagtggagtagatgctaaagcgattctttctgcacgattgagtaaatcaagacgattagaaaatctcattgctcagctccccggtgagaagaaaaatggcttatttgggaatctcattgctttgtcattgggtttgacccctaattttaaatcaaattttgatttggcagaagatgctaaattacagctttcaaaagatacttacgatgatgatttagataatttattggcgcaaattggagatcaatatgctgatttgtttttggcagctaagaatttatcagatgctattttactttcagatatcctaagagtaaatactgaaataactaaggctcccctatcagcttcaatgattaaacgctacgatgaacatcatcaagacttgactcttttaaaagctttagttcgacaacaacttccagaaaagtataaagaaatcttttttgatcaatcaaaaaacggatatgcaggttatattgatgggggagctagccaagaagaattttataaatttatcaaaccaattttagaaaaaatggatggtactgaggaattattggtgaaactaaatcgtgaagatttgctgcgcaagcaacggacctttgacaacggctctattccccatcaaattcacttgggtgagctgcatgctattttgagaagacaagaagacttttatccatttttaaaagacaatcgtgagaagattgaaaaaatcttgacttttcgaattccttattatgttggtccattggcgcgtggcaatagtcgttttgcatggatgactcggaagtctgaagaaacaattaccccatggaattttgaagaagttgtcgataaaggtgcttcagctcaatcatttattgaacgcatgacaaactttgataaaaatcttccaaatgaaaaagtactaccaaaacatagtttgctttatgagtattttacggtttataacgaattgacaaaggtcaaatatgttactgaaggaatgcgaaaaccagcatttctttcaggtgaacagaagaaagccattgttgatttactcttcaaaacaaatcgaaaagtaaccgttaagcaattaaaagaagattatttcaaaaaaatagaatgttttgatagtgttgaaatttcaggagttgaagatagatttaatgcttcattaggtacctaccatgatttgctaaaaattattaaagataaagattttttggataatgaagaaaatgaagatatcttagaggatattgttttaacattgaccttatttgaagatagggagatgattgaggaaagacttaaaacatatgctcacctctttgatgataaggtgatgaaacagcttaaacgtcgccgttatactggttggggacgtttgtctcgaaaattgattaatggtattagggataagcaatctggcaaaacaatattagattttttgaaatcagatggttttgccaatcgcaattttatgcagctgatccatgatgatagtttgacatttaaagaagacattcaaaaagcacaagtgtctggacaaggcgatagtttacatgaacatattgcaaatttagctggtagccctgctattaaaaaaggtattttacagactgtaaaagttgttgatgaattggtcaaagtaatggggcggcataagccagaaaatatcgttattgaaatggcacgtgaaaatcagacaactcaaaagggccagaaaaattcgcgagagcgtatgaaacgaatcgaagaaggtatcaaagaattaggaagtcagattcttaaagagcatcctgttgaaaatactcaattgcaaaatgaaaagctctatctctattatctccaaaatggaagagacatgtatgtggaccaagaattagatattaatcgtttaagtgattatgatgtcgatcacattgttccacaaagtttccttaaagacgattcaatagacaataaggtcttaacgcgttctgataaaaatcgtggtaaatcggataacgttccaagtgaagaagtagtcaaaaagatgaaaaactattggagacaacttctaaacgccaagttaatcactcaacgtaagtttgataatttaacgaaagctgaacgtggaggtttgagtgaacttgataaagctggttttatcaaacgccaattggttgaaactcgccaaatcactaagcatgtggcacaaattttggatagtcgcatgaatactaaatacgatgaaaatgataaacttattcgagaggttaaagtgattaccttaaaatctaaattagtttctgacttccgaaaagatttccaattctataaagtacgtgagattaacaattaccatcatgcccatgatgcgtatctaaatgccgtcgttggaactgctttgattaagaaatatccaaaacttgaatcggagtttgtctatggtgattataaagtttatgatgttcgtaaaatgattgctaagtctgagcaagaaataggcaaagcaaccgcaaaatatttcttttactctaatatcatgaacttcttcaaaacagaaattacacttgcaaatggagagattcgcaaacgccctctaatcgaaactaatggggaaactggagaaattgtctgggataaagggcgagattttgccacagtgcgcaaagtattgtccatgccccaagtcaatattgtcaagaaaacagaagtacagacaggcggattctccaaggagtcaattttaccaaaaagaaattcggacaagcttattgctcgtaaaaaagactgggatccaaaaaaatatggtggttttgatagtccaacggtagcttattcagtcctagtggttgctaaggtggaaaaagggaaatcgaagaagttaaaatccgttaaagagttactagggatcacaattatggaaagaagttcctttgaaaaaaatccgattgactttttagaagctaaaggatataaggaagttaaaaaagacttaatcattaaactacctaaatatagtctttttgagttagaaaacggtcgtaaacggatgctggctagtgccggagaattacaaaaaggaaatgagctggctctgccaagcaaatatgtgaattttttatatttagctagtcattatgaaaagttgaagggtagtccagaagataacgaacaaaaacaattgtttgtggagcagcataagcattatttagatgagattattgagcaaatcagtgaattttctaagcgtgttattttagcagatgccaatttagataaagttcttagtgcatataacaaacatagagacaaaccaatacgtgaacaagcagaaaatattattcatttatttacgttgacgaatcttggagctcccgctgcttttaaatattttgatacaacaattgatcgtaaacgatatacgtctacaaaagaagttttagatgccactcttatccatcaatccatcactggtctttatgaaacacgcattgatttgagtcagctaggaggtgacggtggagggccaaaaaagaaaagaaaagttgaagatgcttctgctcatcatcaccatcaccatcaccattaaatccgctctaaccgaaaaggaaggagttagacaacctgaagtctaggtccctatttatttttttatagttatgttagtattaagaacgttatttatatttcaaatttttcttttttttctgtacagacgcgtgtacgcatgtaacattatactgaaaaccttgcttgagaaggttttgggacgctcgaagccgcggtgagcaaaaggccagcaaaaggccaggaaccgtaaaaaggccgcgttgctggcgtttttccataggctccgcccccctgacgagcatcacaaaaatcgacgctcaagtcagaggtggcgaaacccgacaggactataaagataccaggcgtttccccctggaagctccctcgtgcgctctcctgttccgaccctgccgcttaccggatacctgtccgcctttctcccttcgggaagcgtggcgctttctcatagctcacgctgtaggtatctcagttcggtgtaggtcgttcgctccaagctgggctgtgtgcacgaaccccccgttcagcccgaccgctgcgccttatccggtaactatcgtcttgagtccaacccggtaagacacgacttatcgccactggcagcagccactggtaacaggattagcagagcgaggtatgtaggcggtgctacagagttcttgaagtggtggcctaactacggctacactagaaggacagtatttggtatctgcgctctgctgaagccagttaccttcggaaaaagagttggtagctcttgatccggcaaacaaaccaccgctggtagcggtggtttttttgtttgcaagcagcagattacgcgcagaaaaaaaggatctcaagaagatcctttgatcttttctacactagtcgaagcatctgtgcttcattttgtagaacaaaaatgcaacgcgagagcgctaatttttcaaacaaagaatctgagctgcatttttacagaacagaaatgcaacgcgaaagcgctattttaccaacgaagaatctgtgcttcatttttgtaaaacaaaaatgcaacgcgagagcgctaatttttcaaacaaagaatctgagctgcatttttacagaacagaaatgcaacgcgagagcgctattttaccaacaaagaatctatacttcttttttgttctacaaaaatgcatcccgagagcgctatttttctaacaaagcatcttagattactttttttctcctttgtgcgctctataatgcagtctcttgataactttttgcactgtaggtccgttaaggttagaagaaggctactttggtgtctattttctcttccataaaaaaagcctgactccacttcccgcgtttactgattactagcgaagctgcgggtgcattttttcaagataaaggcatccccgattatattctataccgatgtggattgcgcatactttgtgaacagaaagtgatagcgttgatgattcttcattggtcagaaaattatgaacggtttcttctattttgtctctatatactacgtataggaaatgtttacattttcgtattgttttcgattcactctatgaatagttcttactacaatttttttgtctaaagagtaatactagagataaacataaaaaatgtagaggtcgagtttagatgcaagttcaaggagcgaaaggtggatgggtaggttatatagggatatagcacagagatatatagcaaagagatacttttgagcaatgtttgtggaagcggtattcgcaatattttagtagctcgttacagtccggtgcgtttttggttttttgaaagtgcgtcttcagagcgcttttggttttcaaaagcgctctgaagttcctatactttctagagaataggaacttcggaataggaacttcaaagcgtttccgaaaacgagcgcttccgaaaatgcaacgcgagctgcgcacatacagctcactgttcacgtcgcacctatatctgcgtgttgcctgtatatatatatacatgagaagaacggcatagtgcgtgtttatgcttaaatgcgtatatgtgttatgtagtatactctttcttcaacaattaaatactctcggtagccaagttggtttaaggcgcaagactgtaatttatcactacgaaatcttgagatcgggcgttcgactcgcccccgggagagatggccggcatggtcccagcctcctcgctggcgccggctgggcaacaccttcgggtggcgaatgggactttcataataacgtccaataaatgttttagagctagaaatagcaagttaaaataaggctagtccgttatcaacttgaaaaagtggcaccgagtcggtgctttttttattttttgtcactattgttatgtaaaatgccacctctgacagtatggaacgcaaacttctgtctagtggatataggtctagagatctgtttagcttgcctcgtccccgccgggtcacccggccagcgacatggaggcccagaataccctccttgacagtcttgacgtgcgcagctcaggggcatgatgtgactgtcgcccgtacatttagcccatacatccccatgtataatcatttgcatccatacattttgatggccgcacggcgcgaagcaaaaattacggctcctcgctgcagacctgcgagcagggaaacgctcccctcacagacgcgttgaattgtccccacgccgcgcccctgtagagaaatataaaaggttaggatttgccactgaggttcttctttcatatacttccttttaaaatcttgctaggatacagttctcacatcacatccgaacataaacaaccatgggtaaaaagcctgaactcaccgcgacgtctgtcgagaagtttctgatcgaaaagttcgacagcgtctccgacctgatgcagctctcggagggcgaagaatctcgtgctttcagcttcgatgtaggagggcgtggatatgtcctgcgggtaaatagctgcgccgatggtttctacaaagatcgttatgtttatcggcactttgcatcggccgcgctcccgattccggaagtgcttgacattggggaattcagcgagagcctgacctattgcatctcccgccgtgcacagggtgtcacgttgcaagacctgcctgaaaccgaactgcccgctgttctgcagccggtcgcggaggccatggatgcgatcgctgcggccgatcttagccagacgagcgggttcggcccattcggaccgcaaggaatcggtcaatacactacatggcgtgatttcatatgcgcgattgctgatccccatgtgtatcactggcaaactgtgatggacgacaccgtcagtgcgtccgtcgcgcaggctctcgatgagctgatgctttgggccgaggactgccccgaagtccggcacctcgtgcacgcggatttcggctccaacaatgtcctgacggacaatggccgcataacagcggtcattgactggagcgaggcgatgttcggggattcccaatacgaggtcgccaacatcttcttctggaggccgtggttggcttgtatggagcagcagacgcgctacttcgagcggaggcatccggagcttgcaggatcgccgcggctccgggcgtatatgctccgcattggtcttgaccaactctatcagagcttggttgacggcaatttcgatgatgcagcttgggcgcagggtcgatgcgacgcaatcgtccgatccggagccgggactgtcgggcgtacacaaatcgcccgcagaagcgcggccgtctggaccgatggctgtgtagaagtactcgccgatagtggaaaccgacgccccagcactcgtccgagggcaaaggaataatcagtactgacaataaaaagattcttgttttcaagaacttgtcatttgtatagtttttttatattgtagttgttctattttaatcaaatgttagcgtgatttatattttttttcgcctcgacatcatctgcccagatgcgaagttaagtgcgcagaaagtaatatcatgcgtcaatcgtatgtgaatgctggtcgctatactgctgtcgattcgatactaacgccgccatccagtgtcgaaaacgagctctcgagaacccttaatgtcgacagtcgaacaagaagcaggcaaagtttagagcactgcccctccgcactcaaaaaagaaaaaactaggaggaaaataaaattctcaaccacacaaacacataaacacatacaaatacaaatacaagcttatttacttgacatcgcgcgatcttccactattcagcgccgtccgccctctctcgtgttttttgtttacgcgacaactatgcgaaatccggagcaacgggcaaccgtttggggaaagaccacacccacgcgcgatcgccatggcaacgaggtcgcacacgccccacacccagacctccctgcgagcgggcatgggtacaatgtccccgttgccacagacaccacttcgtagcacagcgcagagcgtagcgtgttgttgctgctgacaaaagaaaatttttcttagcaaagcaaaggaggggaagcacgggcagatagcaccgtaccatacccttggaaactcgaaatgaacgaagcaggaaatgagagaatgagagttttgtaggtatatatagcggtagtgtttgcgcgttaccatcatcttctggatctatctattgttcttttcctcatcactttcccctttttcgctcttcttcttgtcttttatttctttcttttttttaattgttccctcgattggctatctaccaaagaatccaaacttaatacacgtatttatttgtccaattaccatggataagaaatactcaataggcttagatatcggcacaaatagc

SEQ ID NO: 19 - DNA, 5372 bp, Artificial Sequence
  1 _pET21d(+)
tggcgaatgggacgcgccctgtagcggcgcattaagcgcggcgggtgtggtggttacgcgcagcgtgaccgctacacttgccagcgccctagcgcccgctcctttcgctttcttcccttcctttctcgccacgttcgccggctttccccgtcaagctctaaatcgggggctccctttagggttccgatttagtgctttacggcacctcgaccccaaaaaacttgattagggtgatggttcacgtagtgggccatcgccctgatagacggtttttcgccctttgacgttggagtccacgttctttaatagtggactcttgttccaaactggaacaacactcaaccctatctcggtctattcttttgatttataagggattttgccgatttcggcctattggttaaaaaatgagctgatttaacaaaaatttaacgcgaattttaacaaaatattaacgtttacaatttcaggtggcacttttcggggaaatgtgcgcggaacccctatttgtttatttttctaaatacattcaaatatgtatccgctcatgagacaataaccctgataaatgcttcaataatattgaaaaaggaagagtatgagtattcaacatttccgtgtcgcccttattcccttttttgcggcattttgccttcctgtttttgctcacccagaaacgctggtgaaagtaaaagatgctgaagatcagttgggtgcacgagtgggttacatcgaactggatctcaacagcggtaagatccttgagagttttcgccccgaagaacgttttccaatgatgagcacttttaaagttctgctatgtggcgcggtattatcccgtattgacgccgggcaagagcaactcggtcgccgcatacactattctcagaatgacttggttgagtactcaccagtcacagaaaagcatcttacggatggcatgacagtaagagaattatgcagtgctgccataaccatgagtgataacactgcggccaacttacttctgacaacgatcggaggaccgaaggagctaaccgcttttttgcacaacatgggggatcatgtaactcgccttgatcgttgggaaccggagctgaatgaagccataccaaacgacgagcgtgacaccacgatgcctgcagcaatggcaacaacgttgcgcaaactattaactggcgaactacttactctagcttcccggcaacaattaatagactggatggaggcggataaagttgcaggaccacttctgcgctcggcccttccggctggctggtttattgctgataaatctggagccggtgagcgtgggtctcgcggtatcattgcagcactggggccagatggtaagccctcccgtatcgtagttatctacacgacggggagtcaggcaactatggatgaacgaaatagacagatcgctgagataggtgcctcactgattaagcattggtaactgtcagaccaagtttactcatatatactttagattgatttaaaacttcatttttaatttaaaaggatctaggtgaagatcctttttgataatctcatgaccaaaatcccttaacgtgagttttcgttccactgagcgtcagaccccgtagaaaagatcaaaggatcttcttgagatcctttttttctgcgcgtaatctgctgcttgcaaacaaaaaaaccaccgctaccagcggtggtttgtttgccggatcaagagctaccaactctttttccgaaggtaactggcttcagcagagcgcagataccaaatactgtccttctagtgtagccgtagttaggccaccacttcaagaactctgtagcaccgcctacatacctcgctctgctaatcctgttaccagtggctgctgccagtggcgataagtcgtgtcttaccgggttggactcaagacgatagttaccggataaggcgcagcggtcgggctgaacggggggttcgtgcacacagcccagcttggagcgaacgacctacaccgaactgagatacctacagcgtgagctatgagaaagcgccacgcttcccgaagggagaaaggcggacaggtatccggtaagcggcagggtcggaacaggagagcgcacgagggagcttccagggggaaacgcctggtatctttatagtcctgtcgggtttcgccacctctgacttgagcgtcgatttttgtgatgctcgtcaggggggcggagcctatggaaaaacgccagcaacgcggcctttttacggttcctggccttttgctggccttttgctcacatgttctttcctgcgttatcccctgattctgtggataaccgtattaccgcctttgagtgagctgataccgctcgccgcagccgaacgaccgagcgcagcgagtcagtgagcgaggaagcggaagagcgcctgatgcggtattttctccttacgcatctgtgcggtatttcacaccgcatatatggtgcactctcagtacaatctgctctgatgccgcatagttaagccagtatacactccgctatcgctacgtgactgggtcatggctgcgccccgacacccgccaacacccgctgacgcgccctgacgggcttgtctgctcccggcatccgcttacagacaagctgtgaccgtctccgggagctgcatgtgtcagaggttttcaccgtcatcaccgaaacgcgcgaggcagctgcggtaaagctcatcagcgtggtcgtgaagcgattcacagatgtctgcctgttcatccgcgtccagctcgttgagtttctccagaagcgttaatgtctggcttctgataaagcgggccatgttaagggcggttttttcctgtttggtcactgatgcctccgtgtaagggggatttctgttcatgggggtaatgataccgatgaaacgagagaggatgctcacgatacgggttactgatgatgaacatgcccggttactggaacgttgtgagggtaaacaactggcggtatggatgcggcgggaccagagaaaaatcactcagggtcaatgccagcgcttcgttaatacagatgtaggtgttccacagggtagccagcagcatcctgcgatgcagatccggaacataatggtgcagggcgctgacttccgcgtttccagactttacgaaacacggaaaccgaagaccattcatgttgttgctcaggtcgcagacgttttgcagcagcagtcgcttcacgttcgctcgcgtatcggtgattcattctgctaaccagtaaggcaaccccgccagcctagccgggtcctcaacgacaggagcacgatcatgcgcacccgtggggccgccatgccggcgataatggcctgcttctcgccgaaacgtttggtggcgggaccagtgacgaaggcttgagcgagggcgtgcaagattccgaataccgcaagcgacaggccgatcatcgtcgcgctccagcgaaagcggtcctcgccgaaaatgacccagagcgctgccggcacctgtcctacgagttgcatgataaagaagacagtcataagtgcggcgacgatagtcatgccccgcgcccaccggaaggagctgactgggttgaaggctctcaagggcatcggtcgagatcccggtgcctaatgagtgagctaacttacattaattgcgttgcgctcactgcccgctttccagtcgggaaacctgtcgtgccagctgcattaatgaatcggccaacgcgcggggagaggcggtttgcgtattgggcgccagggtggtttttcttttcaccagtgagacgggcaacagctgattgcccttcaccgcctggccctgagagagttgcagcaagcggtccacgctggtttgccccagcaggcgaaaatcctgtttgatggtggttaacggcgggatataacatgagctgtcttcggtatcgtcgtatcccactaccgagatatccgcaccaacgcgcagcccggactcggtaatggcgcgcattgcgcccagcgccatctgatcgttggcaaccagcatcgcagtgggaacgatgccctcattcagcatttgcatggtttgttgaaaaccggacatggcactccagtcgccttcccgttccgctatcggctgaatttgattgcgagtgagatatttatgccagccagccagacgcagacgcgccgagacagaacttaatgggcccgctaacagcgcgatttgctggtgacccaatgcgaccagatgctccacgcccagtcgcgtaccgtcttcatgggagaaaataatactgttgatgggtgtctggtcagagacatcaagaaataacgccggaacattagtgcaggcagcttccacagcaatggcatcctggtcatccagcggatagttaatgatcagcccactgacgcgttgcgcgagaagattgtgcaccgccgctttacaggcttcgacgccgcttcgttctaccatcgacaccaccacgctggcacccagttgatcggcgcgagatttaatcgccgcgacaatttgcgacggcgcgtgcagggccagactggaggtggcaacgccaatcagcaacgactgtttgcccgccagttgttgtgccacgcggttgggaatgtaattcagctccgccatcgccgcttccactttttcccgcgttttcgcagaaacgtggctggcctggttcaccacgcgggaaacggtctgataagagacaccggcatactctgcgacatcgtataacgttactggtttcacattcaccaccctgaattgactctcttccgggcgctatcatgccataccgcgaaaggttttgcgccattcgatggtgtccgggatctcgacgctctcccttatgcgactcctgcattaggaagcagcccagtagtaggttgaggccgttgagcaccgccgccgcaaggaatggtgcatgcaaggagatggcgcccaacagtcccccggccacggggcctgccaccatacccacgccgaaacaagcgctcatgagcccgaagtggcgagcccgatcttccccatcggtgatgtcggcgatataggcgccagcaaccgcacctgtggcgccggtgatgccggccacgatgcgtccggcgtagaggatcgagatctcgatcccgcgaaattaatacgactcactataggggaattgtgagcggataacaattcccctctagaaataattttgtttaactttaagaaggagatataccatggctctcgagcaccaccaccaccaccactgagatccggctgctaacaaagcccgaaaggaagctgagttggctgctgccaccgctgagcaataactagcataaccccttggggcctctaaacgggtcttgaggggttttttgctgaaaggaggaactatatccggat

SEQ ID NO: 20 - DNA, 888 bp, Artificial Sequence
  2_PT12_dna
atgccaggtacttctgaagctgctgaattgtgttctaccattgaagaatccgctaggttgttgaatgttgcctattctagagatagagtttggtccttgttgtctgcttatggtgatgcttttgctcatccaggtgctgttgttgcttttagagttgctactgctatgagacatgttggtgaattggattgcagattcactactcatccagatgatagagatccatatgctagagctttgtctcatggtttgactccagaaactgatcatccagttggttctttgttggctgaagttcaaggtagatgtccagttgaatctcatggtattgatttcggtgttgttggtggctttaaaaagatctacgctttctttactccagacgacttgcaaaagacttctaagttggctgaaattccagctatgccaagatctttggctggtaatgttgaattctttgccagacatggtttggatgatagagttggtgttttcggtattgactacccatctagaactgttaacgtttacttcaacgatgttccagctggttcttttgatccagaaaccattagatctaccttgagggaaattggtatggctgctccatctgaaagaatgttgaaattgggtgaaaaggctttcggcttgtatgttactttgggttgggaatcctctagaatcgaaagaatttgttatgctgctgctactactgatttgactactttgccagttccagttgaaccagaaatcgaaaagttcgttagatctgttccatacggtggtgatgatagaaagtttgtttatggtgttgctttgaccccacagggtgaatattacaaattggaatctcactacagatggaagccaggtgctatggattttatc

SEQ ID NO: 21 - DNA, 921 bp, Artificial Sequence
  3_PT20_dna
atgccaggtactgatgatgttgctgttgatgttgcttctgtttactccgctattgaaaaatctgctggtttgttggatgttaccgctgctagagaagttgtttggccagttttgactgctttcgaagatgttttggaacaagctgttattgctttcagagttgctaccaatgctagacatgaaggtgatttcgatgttagattcaccgttcctgaagaagttgatccatacgctgttgctttgtccagatctttgattgctaaaaccgatcatccagtcggttctttgttgtccgatattcaacaattgtgctccgttgatacttacggtgttgatttgggtgttaagtctggttttaagaaggtttgggtttactttccagctggtgaacacgaaactttggctagattgactggtttgacttctatgccaggttctttggctggtaatgttgatttctttaccagatatggtttggccgataaggttgatgttatcggtattgactacagatccagaaccatgaatgtttactttgctgctccatctgaatgcttcgaaagagaaactgttttggccatgcatagagatattggtttgccatctccatccgaacaaatgttcaagttctgtgaaaattccttcggcttgtacactactttgaattgggacaccatggaaatcgaaagaatttcctatggtgtcaagaccgaaaacccaatgactttttttgctaggttgggtactaaggttgaacacttcgttaagaatgttccatacggtgttgacacccaaaaaatggtttatgctgctgttacttcctctggtgaagagtactacaaattgcaatcttactacaggtggagatccgtgtctagattgaatgctgcttatattgctgccagggacaaagaatctact

SEQ ID NO: 22 - DNA, 912 bp, Artificial Sequence
  4_PT24_dna
atgagcgaacctgccgagtcagcacaactatactctgccatagaagagtcagcgagactactggaagtgccatgttctagagagcgtgtatggccaattctatctgcctatgcagattccttgccaaaagctgttatcgcactgagggtcgcaaccggagcccgttacagaggtgatctagactggaggttcacagtcgggagcgatgtcgacccgtacgcggtcgcgcttagtaatggacttactgaaaaaacagaccaccccgtaggaaccctgttggccgagatctccgagcgttgcccaatagcctcatacggaatcgactttggtgttgcaggtgggttcaagaaaatttatcttttctttcctccggacggcatgcaatctctttcaaccctggcagaattgccttctatgccacgttctttagccgataatgtagatcttttcgccaggcgtggtcttggggataaggtcaataccttcggaatagactataggcacaggaccgtcaatgtctatttcggcgggctgcctgacgagtgcctagaaccagcgggggtactttccatgaccagggagctaggtcttcccgacccaggcgagcaaatgcttaggctgggcaggcaagcgtttggaatctatgcgtctttaggctgggaaagcagcgctgtagagaggttctgcttcgcggtcatggcatctgattctagttccctaccagttccactagagccggaaatcgaacaatttctaaaaggtcttcccaacaatgctgcggatagcagattcgtttactatgcgggcgttagttccaccggtgaggaaaactataaagtgcaatcctactataattggcaaccacgtatgttggaccaaatgctattgtctgattcaggtgagacaagagct

SEQ ID NO: 23 - DNA, 915 bp, Artificial Sequence
  PT26_dna
atgagcggcgcagcagaagtggaaagagtatattccgcaatggaagaggccgccggtctattggatgttgcctgtagccccgagaaagtaaggccgatcctgacagcctttcaagacgtgttaagtgatggcgtaatcgtgtattcaatggcttcaggtaggcacgccacggaattagacttctcaattagtgtcccagcggatcacggcgacccatacactgctgcactggcacatggactgatacctgagaccgatcacccagttggcaacttgttggctgatactcagaaggcactaccagtctcaatgttcgcggtagatggagaggtaacaggtggtttcaaaaagacctatgcttttttccctactgacgacatgcccgggttggcccaattgatagatataccatccatgcccccttccgtggccgagaatgctgaactattcgctagatacggtttggacaaagttcaaatgacgtctttagattacaagaggaaacaggttaatctatacttcagtaaccttcagcctgaattcctggctccagaacccgtactgtccatggtacgtgaaatgggcctagaacttcccggagagaagggtctaaagttcgctcgtaggtctttcgcaatctaccctactctgggttgggaaagcggaaagatagagagattgtgttttgcagtaatttctacggaccctgggcttgtacctgcaccggacgaagccgatagagcgttattctccacttatgcaaacaatgccccctacgcatacgccggggaaaagcgtactttggtgtacggattaaccctttctccaacggaggagtattataaattaggcagttattaccagataactgacattcagagaacccttttgaaagccttcgacgcgctgactgat

SEQ ID NO: 24 - DNA, 912 bp, Artificial Sequence
  PT32_dna
atgagtcatacagcggtggtggaggatgtttacagtgcaattgaggatagtgctcgtcttgccggtgtaccgtgctcccgtgaaggaatcgtgccgattctgacggcctatggggacacgttagcagatgcaggcatagttttgtcagtttccactaacgaacatcctgtgtccgaactagattacacaataactgtgcccacccatgggccggacccttacacaactgcggtcgaacatggattcgttactaggacggaccaccccgcagccgcgcttttacccgacattcaacaacaggtgcccgtatcagaatacttcatcgacggtggcgtagtcagtggtttttccaaaatctatgctcacttcccatttactccattgacagtagaacagttagcagccgtagaaagtatgccgcgtgctgttgccgagaatgccgggttgtttgctcgtcatcaccttcatcaggccgctatgatagggatagattaccgtaggcgtactgtcaatctttattttgcccagctaccagagcaattcggaactgcggaaaatatcctaagtctacaaagggagcttggattgccccgtccggacggcgagcttctagaatttgcccgtaaaagtttcagggtttacgtaacgctgggctgggactcagcgcaagtaaaacgtatctgctacgcccctgcccctgtgagggggtgggatccggcggcactgcctgtgccagtcgaaccggaaacagaaaagtttgttagaggggccagaagaacttatggtggtgaccctatcgttattgccgcgtgtaaatggacgcctgaaggagcttatttgaacttgggaccttatacaagggtcagtcccttaatgaggaccctattgcgtaacctaactggacaggaagtt

SEQ ID NO: 25 - DNA, 897 bp, Artificial Sequence
  PT39_dna
atggagtcttatatgtcaggcacttctgaagctgatgaaatatgttcagcggtaacggagacggcgggccgtttaggtatcgcattcagtagggataaagtttggcctatattatcagcatatggggacgctttcgctcacgctatgcctttggccttcaggatggcaactggtccgcagcacgctggtgatgtggattgcagatttatcacccatcctaaggacagaaacccctatcctctagccgtcagtaaggggttaactcctaaaacatcacacccggtagggacccttttgtccgaaattgaggaaaggttccctattgacggctacggaattgactttggtgtggtcaacgggttcaccaaggtttacgcagggtttgcgccccaggatctacagaacgcatccaaattggtggagattccagcgatgccgagaagcctggccgggaattttgatttcttcgtccgtcacggacttgacgataaagtggcattcgtcgccgtagattacctacacagaacggtaaacgtatacttcaacgacgtcccggcagcttgttttgaaagcgacggaatcagacgtatgttgcgtgatttggggttaccaggtccgagtgatagaatgttgggaattggtggacaggcattcggtctttatataacattgaactgggacagtcccgcaattgaaagattctgctttggcgtcacaacgaccgacttatcctccctacccgtctcaattgaaccgcagttagagaagtttgcacattgtgtcccatacggcggagccgataggaagtttgtttacggcgtcgcggcagcaccagagggagaatattataaactggaaacacactacaagtggaatccagggaccgtagctttcatt

SEQ ID NO: 26 - DNA, 891 bp, Artificial Sequence
  PT42_dna
atggacgaggtttatgctgctgtagaacagaccagtcgtttgttggacgtgccgtgtagccccgaccgttttgaacccgtgtggaaagcctttggtgaccagttgccagattctcatcttgtcttttcaatggcagccggagaagcgcaccgtggagaattagattttgactttagcctaaggccagaaggggcagacccatatactactgcacttgaacacggatttattgagccgacagatcatccagtcgggtctgtactagcagaggtcggtaaacgttttgctatcgcctcctacggcgtcgaatacggagtggtggggggctttaagaagtcatatgcattctttccgctggatgacttcccccctctagctcagttcgcagaagtcccgtcagtgccgccgtgtttagctgggcatgtggagacactgacccgtcttggatttgatgacaaggtttctgcgatcggtgttaattatagaaagaataccttgaacgtatatttagcggcgagcgcggttgacactggtgataaattagcgttactgagagcatttggttacccagaaccagatgcgcgtgttagacaattcatcgaaagatcattttccttatatcccacgtttaactgggactcaagcgcagcggagagaatttgctttagcgtcaaaacgcagcaaccaggtgagcttcctgccccgcatgacgaacctacggaagcatttgcaagacaggtcccgcacgtttatgagggtgggcgtgagtttgtgtctgccgtagcgctagccccctctggagcttcatactacaagttggcagcctattatcaaaaagcaaggggggcatctaacgcggcctttgccgcaaagagggaagacgctgcagct

SEQ ID NO: 27 - DNA, 915 bp, Artificial Sequence
  PT45_dna
atgtctggtgagaccgatgcggaagagctatgttccgcgattgaggaaacggccaggctagtcggagccccctgtagcagagaaaaaatttggcctatactaacggaataccgttccggattcgccgaggggggggtggttttttcagctcaagcgggagagaaccacgcaggagagcttgattacgggcttgctgtgccacccagaatagatgacccatatgcgcacgccctggcgcatgggttcgtgacagaaacagatcacccggtggccgccctactttctgacatcagagagcgttgcgccgttaccgagcatttcgctgactgcggagtagtcggtgggtttcgtaaattatacgcccatttccctcgtgacctacaaaaggtgtctgagattgcggatataccctcaatgccaagggcggttgctgaaaatgttggtttgttcacaaggtacgggttagagaacgtagtgatggtaggcgtcaactacaagaataaaacggtcagcctatactttcaattcactgccgaggggcgtcctagaccatccgccatcagaagtatgctaggggatattggaatgaccgaaccaaacgagcgtatgctagacttcgcgtccaactcattcagagccaatattacattatcttgggattctccaaagatactgagagtggccttcgctcctccgcctggagctggtttgaacctaagtacggtccctatacccacaggtcctcacttggaggatttcgttaccagggcgccccgtgcgtacgatggcgagcgtatgaacttattcgctgttaagtggacccaagacaaggaattcctagaggtatgcagttattaccaactaccggcaggttatgagcccatcaggcagatggaaatacacaaggaacagggg

SEQ ID NO: 28 - DNA, 948 bp, Artificial Sequence
  PT47_dna
atgatcggaattgatttcttggagtgcctggttagcgaaggcattgaagcggaaggcctatactctgctatcgaagaatctgccagaatggtggatgccccctttagcagggataaagtgtggcccattttaagtgcttttggtggtggcttttccgacgctgggggcgtgatattctcactacaagcaggaaaagatgtccccgaaatggagtacagcgcgcagattagcgcggaagttggtgacccctatgctcatgcccttgcgacgggtgtgttaaacgaaacagatcaccctgtaagtacagtgcttgcggagatagtgtctctggccccaacatccgaacactacattgattgcggaatcgtgggtggattcaaaaagatatacgcgaattttcctcatgaccaacagaaagtcagtcgtctagcggatctgcccgcgatgccgagggcggtaggcgcaaatgccgagttcttcgataggtatggcctggataacgttgctttaataggtgtagactaccgtaataagacgataaatctatacttccaagcgcctgcggaaacagcaggaaatctagatccaaaaacggtgagcgcaatgcttcgtgaaacaggaatgagtaccccgagtgaggaaatggtagcctacgcagatagagcctacaggatctatgccactctagggtgggatagcccagaagtaatgagattagccttcgcaccacaacccaggaggtctatcgatctagccgagctgccggccaggttggagccacgtattgagcagtttatgcgtgccactccgcacaaataccccggagccctaataaatgcaaccgccgcaaaatggtccaagaagcatgaagttctggacttggctgcatactatcaagtgagcgcgctgcaccttaaagctatccaagctgaagaagggcaatcctct

SEQ ID NO: 29 - DNA, 1029 bp, Artificial Sequence
  PT48_dna 8
atgtctaggtccttccatgcattcttattcaactgtttcgattgtaataaggaaaatatcaaaatgacgatcgtcaaccgtattagaacagacgtggttaacgtggccaagagtttcggtgcagaatacagcgaggcggttattgaccagatatttcaaggatttggcgaaaagtttacgaatacagggttcgctatcagagtgcaaaataagagaaaccagaaggtggattgcaatataaggtacggtgaagcgaaagagaactgtttggcatgggacatcgcgcgtgagtctggcctgctttcagatcaaggtcatccggttgacaccctaatacaggagatgtttcaagcaatcccagctattgcatacggtgccgatttcgatatcaattatggtttagtaaaaatatggcatctacctaagattgtgcccgtggaggaagcatttaagattccatcccttcctaagtcagttaacgcgcacattgatttttttaaaaaataccatctggatgctttatgcgcattgaccgttgattacaggaacaagagcacgaacctttattttgacgcacaccaccccgaacagagaacaacacagttttataaaaatatattacagagtcaacaatttgaggtgccctccgatgaagttctagaaatactggtaaattgccccgaaatcgcagtgacttttaactggagttcaccaggtatagagagaatgtgtttttacacagcctttgttaatagagagacggttccacaacatatcaaccccgtgttgaaaaagtttgcccaagaagcgccagctttacttgacaatcccggcttccttgtcggttggtcctttggcccagatgccaaaaaagggacttatatcaagattgacgtagactaccatggtttagtggtgccgtcattttttcatatgcacaatctacccctgcctatcccggaagcaaactctgtatttgatttgccgagcagcgatactgaggacaaactgaacagtatcgtgatgtct

SEQ ID NO: 30 - DNA, 1029 bp, Artificial Sequence; identical to SEQ ID NO: 29
  PT49_dna

SEQ ID NO: 31 - DNA, 927 bp, Artificial Sequence
  PT50_dna
atgaatgatgtcaacaggataagaaccgacatcataaatgtagctaagaccttcggggcagagtactcagaaaaggtcctggatgaggtgtttcaggtgtttggcgagcagttcgctgacaattcatttatgattaggacgtctaataaacaacctgacaagttaggttgctacttcaggtaccacgaggaggacgagtcccaattgggatttgcgtgggatattgcaaggaagtcaggattactttctgatcagggccgtccagttgaccagctgattcccgagatttgcgagacttttccgatcatggctgatggagtggatttcgatgtcaaacatggattagctaagatttggcagtctataaagggagtcgttccggtgcaggacgcatttaagttatcactacccgcttcagtcacggcacattctgatttccttaagaatcaccatcttgatgctctgtacgcgttcggcgtggactaccaccactcctccgtcaacctgtacttcgacacctaccatcccaagcaccatacctccgaatactacaagaaccttcttcaagaccttcagtttcaacccccgtccgacgagcttttagagctgcttgctaacaatggagagattgccttgacatttaactttgatagcccacgtatcgagaggttgtgtttctatttaccatttttgaatagagaggctgtaccacaaaacctgctaaatcccttgttaaagaaatatatcaatgaggcccccgccctggtagataaccccggatttatcttagggtggtcattcgggccgcagggaggtaaaggtacatacactaaggtggatgtcgattatcacggaaggaccgtacccctttttatgaaagttcacagtcagccgctgccgaaggcagcagacttcgccctagcccaa

SEQ ID NO: 32 - DNA, 1140 bp, Artificial Sequence
  PT55_dna
atgagcgagcaggtctgtgagatcctgtggtcaaaaaaaatgcaggagtactttaactccttgacccccaatatgcccgaaggactgcgtgatcgttatatcggctacgtaaatgaaaatgcgagggcgagaggagccagcgaggtgaccgaactagatatcataaccgctttactgcgtaatacacccgttttttttagacagaatattagcaatattcccaaggacatcaaggtggacctttcatcattaaccaagagggacttagcgttaatgtcagacgatatagagaaggccgctaagattgccgaggtggggtgtaacaaagagctggtaaataaaattcttaacgtctatgaggagcagttttcacaccctcaagtcgcagttagttttagaacgacaaccaagcccgtcgagaaaaggtccctagatgtaagatatgtagacgtctggacaagccatgatccctatgcgatggcgattgagaacggtctgctagtcaagtcagggcatccagtagataatttgttctatgatattaagagcaacttccctatcatggggtatggtgtagacttcggggtcttgaatggatttgctaagatatggatgagaattcccacacacctgcccgttcccctagagaaacttcaacttattccttcctttcctgattccctaaagaattatatctccctgttgtccaaatacagcatggatcgtatcattatggtcggaattgattacattcataaaagtactaacatttattttgtaaagcgttattatggtgatttgtcaaccgaaacggtaacgagtctaatttccgaacttgggttccctgtcccctctaatgagcttatcgaagaatgcgcccatgcgctattcttctattgtacttttacctgggattcccctaaaattgagagactgagttttcacagagtcgcacatgaccagtcccaggtcccggtgcatttacacccatttctggaaaaatacagtctgaatgcacccatcttgggagacaaaaggaaatttatgtacacggtcgcattgagccccaagggaaattatataaaacttgaatccgattactcatccggtattatggcggacgctctagtggagacttat

SEQ ID NO: 33 - DNA, 897 bp, Artificial Sequence
  PT58_dna
atgtctcagactgcacaaccggcgggtctttaccccgctatcgaagaagcggcacgtttgctggatgtaccttgctcccgtgagaaggtagagcctgtattaacagcgtacggagatacgttggatcaggcggttatagctttcagagtcgccaccggagccaggcacgccggagaacttgattgtcgtttcactatgctgccgaaagatgtagatccatacgctctggcactatcaaggggattaacagcaaaaacggatcaccccgtcggatcattactagccgacttgcaagcgagattcccagttgacagccatggcatagacttcggcgtggtcgggggatttaagaaatcatggtctttttttccgccagatgatcttcaacaacttgctcagttagcccaattgcccgccatgcctcgttctttggcggcaaacctagatttcttcacccgtcacgacctacatgataaggccagcctgatcggaatcgactatagacataaaacggtcaacatttactttgggcaaccaccggcagcctgcttcgtcccagaaaatgttacttctatgctgcacgaactagggcttccagctccaagcgaacagatgctacgtcttggcgagcaggcgtttgggatatatgtcactttgagctgggacagtctgaaagtggagagattatgtttagcagtgatgacccctgatccgactgcgttacctgtagagatagaaccgcgtatagagcaattcataaaaagtgctccacacacagacccggaggaagataggaggttcgtttatgctgtcacagcgtctcccgctggagaatattttaaactacagagttattaccagtggagacccagaatgctaaatttgatgttgctagat

SEQ ID NO: 34 - DNA, 900 bp, Artificial Sequence
  PT62_dna
atgagcacgacagaaagcgaacttgatgacttatatgcagctatagagaagtccgcgagattagtcaacgtgccatgtgctcgtgatgcagtgaggccaactttgaccgcttatggaaccatgttgactcaaagtgtaatcagttttagagttgtgacagatgcgaggaggagtggtgatcttgactaccgtttccttacattaccaagcgacgtagatccttacaatatagcattaagtaataatctaatccctgagacagaccatcctattggtgcgttactggatcaagttagaaaacaatgtcccatagattcctacgggatcgatattggggtagtaggcggtttcaagaagatttggccctttttccccgcggacgggatgcagaaagtctcagaattagctgcgttgcccagcatgcctccgagcttggcagaccatgcccgtatgtttgccagacacggcctagaggacaaagtggggttattaggaatcgactatcatgacaaaacgatgaacgtgtacttcccaggcttaccagcagattacttcgagcccagagccatcgtatctctacatagagaagctggcctaccagacccttctgaccagtttttgactttaacggagaaagcttttgatatatacgccaccatctcatgggagtccccaagaattgaaaggctttgctttcccgtcatcaccccagatccaactaccctaccggtgagaattgatccacacttcgaacagcttgtagacaaagtgcccttctccacgaccgacaggagatttacgtacgccgcgacttcatcacccagaggggagagctataaattttcatggttctatcaatggcagcctcgtatcctagacaagatgaagacttcagacagt

SEQ ID NO: 35 - DNA, 903 bp, Artificial Sequence
  PT69_dna
atgtcaactacgactgagagtgctctggatgacttgtacgtggcgattgagaagtcagcccgtttggctaacgtgccgtgtacgagagatgctgtctggcctgtgctgaccgctttcggcacgatgctgaccagaagtgttattagcttcagggtagtgacggaagcaagaagggctggagatcttgactatagatttttaacattgccaaaggacatcgacccgtatgatatagccagaagtaatggtctaatcaggcaagcggatcatcccattgggtcattattggaccaagtacgtgaacagggtcccgttgatagttatggtattgatgtaggggttgccggtggctttaagaaaatctggccgttctttccagccgacgatgtgagaaacgttgccgagctggctgcattacccagcatgcccgcaggtttggccgaccacgctggcatgttcgctagacacgggttagcagataaagttgggttacttgggatagattatcacgataaaactatgaatgtatacttccccggacttccggcggaacatttcgcgccggaggcggttgccgctttacatcgtgatgcaggctttcccgaaccctctgctcaatttcttgccttaactgcaaaggcttttgatatttacgctacttttggatgggaaagttcaagaatcgagaggctatgttttcctgtaattacacccgatccggcaacgttacctatcccgatcgatccgagattccaggaactagctgataatgctcctttcgctaccaatgatcgtaggtttacatttgctgctacctcctctcccgctggtgaaagttacaaatttagttggttctaccaatggcaacccagaattttagataagatgaagactagtgattcc

SEQ ID NO: 36 - DNA, 927 bp, Artificial Sequence
  PT83_dna
atgtctgaagccgctgatgtcgaaagagtttacgccgctatggaagaggccgctggtttgttgggtgttgcctgtgctagagacaagatttacccattgttatccaccttccaagatactttggttgaaggtggttctgttgtcgttttctctatggcctccggtagacactccaccgaattggacttctctatttctgttccaacttctcatggtgatccatacgccactgtcgttgaaaagggtttatttcctgctactggtcacccagttgacgatttgttagctgacactcaaaagcacttacctgtttctatgttcgctattgacggtgaagttaccggtggtttcaaaaagacttacgccttcttcccaactgacaatatgccaggtgttgctgaattgtctgctatcccatccatgccaccagccgttgccgagaatgctgaattgttcgctcgttatggtttggacaaggtcgcaatgacctcaatggactacaagaaaagacaagtcaacttgtatttcgcagaattgtctgctcaaactttagaagccgaatctgttttggctttggttagagaattaggtttgcacgttccaaacgaattgggtttgaagttttgtaaacgttctttctctgtttatccaactttgaactgggaaaccggtaaaatcgacagattgtgcttcgctgtcatctctaacgacccaaccttggtcccatcctccgatgaaggtgatatcgaaaagttccacaactacgccactaaggctccttacgcttacgtcggtgagaaacgtaccttggtctatggtttgactttatccccaaaggaggaatactacaagttgggtgcttactaccacattaccgacgtcgcaagaggtttgttaaaggccttcgactctttagaagacggctga

SEQ ID NO: 37 - DNA, 1140 bp, Artificial Sequence
  PT117_dna
atgtccgaacaagtctgtgaaatattgtggtccaaaaagatgcaggaatacttcaatagtctgactcctaacatgcctgaggggcttagagaccgttatataggttatgtaaatgaaaatgctagggcgagaggagcctccgaagtcaccgagctggacataattacagctctacttagaaacaccccggtgtttttccgtcagaacataagtaatatcccaaaagatataaaagttgacctgtcctcattgacaaaaagagacttagccttgatgtccgatgacatagagaaggctgcgaagatcgctgaggtgggctgtaacaaagagttggtgaataaaattttgaatgtgtacgaggagcagttttcacatccccaggtagctgtgagctttagaacaaccacgaaacctgttgagaagaggtccctagacgtccgttatgtggacgtttggacatctcatgacccctacgccatggccatagagaatggccttcttgtgaagtcaggccatccggtagataatctattctacgatatcaagagcaatttccctatcatgggttacggagtcgacttcggtgtccttaatgggttcgccaaaatatggatgagaatcccgactcatctaccggttccccttgaaaagctacagctaatccccagttttccggattcattgaagaactatattagcctgctaagtaaatatagcatggatagaattatcatggtcggaattgactacatccataagtcaactaatatttattttgtgaagcgttattatggcgatctgtcaactgaaactgttaccagtttgatatccgagttaggcttccctgttcccagtaatgaacttatcgaagaatgcgcgcacgctcttttcttctattgtacatttacgtgggacagtcctaaaattgaaaggctatctttccacagggtcgcccacgatcaatcacaagtgcccgtccatcttcaccctttcctggagaagtatagcttaaatgcgccaatcttaggagataagcgtaagtttatgtacactgtcgcgctgtcaccaaagggtaattatataaagctagagagtgactactcaagcggtattatggccgacgcactggttgagacttac

SEQ ID NO: 38 - DNA, 933 bp, Artificial Sequence
  PT118_dna
atgtctgaaaatgcggagctagagagaatttattctgtgatcgaagagactgctcaattagttgacgtggcatgttcacgtgcgaaggtctggccggtacttacaacgtttggtgatactctagctcaggccgccatcgcattcagagtggctacgggagcacgttatgttggcgagcttgactgtagattctcaattaggatggatgtcgatccgtatagcacggcgttatcaaacggcctgacagaggagactgaccatcctattggtgccctattatcagaaatccacgacagattccctattgaaacgctaggtgtggactttggggttgtgggtggattcaggaagatttacgcattctttccaggtgaggaccttcagtccctgagcaaggcggcggatatgccgagcatgccacgtagtctggctggtaacttagatttcttcactcgttatgggttgtctgagagagttaccggcatttcaatagattatccgtcacgtacgaccaacgtgtactttgggtggactccagcggataggtttgacaccaaaaccgttctgtctatgctgcgtgacctagagctaccagaccccagcgaacaaatgttaacagtggcaaaagaagcgttcggtatgtatctgacgcttagctgggacagtcctaagatccttcgtttttgtttccctatgccaacaccggatcccacaacattgcctgttcagctagaaccaaagatagaacagttcacgagaggtgtgtcacgtggtagcgcaatggggaaatacgtttacgcggcgacatctacacccgatggggagtactataagctaagtagctattaccaatggaggccgcaagtcatagacttacctacgggctggcgtgcggattccacacagtcacctgaacctatagcagacccagtt

SEQ ID NO: 39 - DNA, 930 bp, Artificial Sequence
  PT129_dna
atgaacgatgtgaatcgtatcaggactgatatcataaatgtagcaaaaacattcggagccgagtattcagaaaaagtactagatgaggttttccaagtgtttggtgaacaatttgcagataatagtttcatgataagaacctcaaacaagcagccagataaacttgggtgttattttaggtatcatgaggaagatgagagtcagctaggtttggcttgggacatagcgcgtaagagtggattgttgtccgatcaaggcagaccggtagatcaactgattcccgaaatatgtgaaacattccccatcatggccgatggcgtagattttgacgtgaaacacggtctagctaagatatggcaaagcatcaaaggtgtggttccggtgcaggacgcgttcaagttgagtttaccagcgagtgtgactacgcacagcgatttcttaaaaaatcaccacctagacgcgctttacgccttcggcattgactaccatcatagctcagtgaatttatattttgacacgtaccatccaaaacatcacacaagcgagtactacaaaaacttgcttcaagaccttcaatttcaaccaccttcagatgaattgcttgagcttttgacgaacaacggcgagatcgccttaacttttaatttcgctagtcctagaattgaaagattatgtttctacttaccgtttcttaatagagaggccgtgccacagaatttacttaacccacttttaaaaaaatacatcaatgaagcccccgccttggtagacaatcccggttttatacttggatggtccttcggcccgcaggggggaaaggggacctacacgaaagttgatgtagactatcacgggagaacagtacccctgtttatgaaagttcattcccagccgcttccgaaggcagctgattttgcgttggcgcaatga

SEQ ID NO: 40 - DNA, 930 bp, Artificial Sequence
  PT131_dna
atggtccccaaggatgcagatccgagatctagcgtatattctgctatagaggaagctgcgggcctaatgggtgctccgtgctcccgtgaaagggtgtggcccattctgacagcgtatggagacggcatctctgaggcgggtattgtattttccgttcagacgggggagaggcacgcgggagaacttgactacaccattacagtcccagcagatgggccggacccatacaccagtgcattgagtaacgggttcctggaagctacccagcatcctgtaggtacgctgttgagcgatataagggcccgttgtcatatcagcgaatacttcattgattgcggtgtagtaggcgggtttaacaaagtgtacgcccactttccccacgatccgctgtctgtcgaaagattagcggaggtcccgtctttacctaggagtttggccgacaatttaggatttttcctaagacatgcgttgagagatgtcgctatgatcgctattgactatagaaaaaagacggtcaatctttatttcgctcagctttcagctgaatgccttaggtcagccaatataagggccatgttgagggagtcaggactaagtgaattagatggtcccatgctggatttcgctcttgggtctttccgtatttacgtcactctagcctgggactccgcgggggtcgaaagaatcagttttgcctcactaatgagttctggttgggtaaatgcggcactgagtgagttcccagttcgtattgaaccagagatcgaacgttttgtaaaaaacgctccgcaagcatatagcggtgacagggtgagaatcctggcaattaagagttcacctggcgacgagtgcctaaatttcggaagttactaccagatatcaccagtggttagaaatctacttgccgcaagggctggggatgctgagcag

SEQ ID NO: 41 - DNA, 900 bp, Artificial Sequence
  PT150_dna
atgccaacaaccgaaagtgaacttgacgatctttacgccgccatcgaaaaatccgcgagaataagcaatataccgtgcaccccagacgcggtacgtccagctttgactgcttttggcgctatcttgactcagtctgtgatgagtttccgtgtggtcaccgaggcgaggcgtgcgggcgatttggattatagattcctgacgcttcccagcgatattgacccctatagaatagccgtctctcacaacttgatcccggatacagatcatcccattggtacattgctggaccaagttcgtgaacattgtccagtggacagttatgggatagaccttggtgtagtaggaggattcaaaaaaatatggcctttcttcccggcggacagtgtgcaaaaagtaagcgatctggcgaccttgcctgcaatgcctgccggactggcggaccacgccgacatgtttgcgaggcacggccttgaagataaggtaggcttgctaggcattgattatcacgacaagacgatgaacgtatatttcccagggctgcctgctgaacattttcaacccgacgccattgttgcactgcacagggatgcaggattcgccgagccatctgaggaattcttgtctctgacacgtcaggcatttgatatatacgcgactttcggctgggagtccaacagaatcgaaagattatgctttcctgtcattactgctgatccaacaagcctaccggtccctctagaacccagatttgccgacttattagaccgtgtacccattacgacgaacgagaggaggttcacatatgctgctacatcaagtcccggcggagagtcatataaattctcctggttttacagatggcagcctaggatactagacaaaatgaaaaccacagacagt

SEQ ID NO: 42 - DNA, 900 bp, Artificial Sequence
  PT151_dna
atgagtacaacagaatccgaattagacgacttgtatgccgcgatagaaaagtcagctaggctggtaaacgtaccatgtgctagagacgcagtcaggccgacacttacagcttacggaaccatgttgacgcagagcgttatcagcttccgtgtggtaacggacgcccgtcgtagcggtgacctagattatagatttcttacattgccttcagatgttgacccctacaacatagctctttcaaataatctaattcccgagaccgatcacccgataggtgcccttttagatcaggtgaggaaacagtgccccatagatagctacggaattgacattggggttgtgggaggattcaaaaagatatggccgttttttccggcagatggtatgcaaaaggtgtccgaactagccgcattgccgagtatgcctcctagcctagccgaccacgcacgtatgttcgctagacatggcttagaagacaaagtcggcctgctgggtatagattaccatgacaaaaccatgaatgtctatttccccggtttgcctgcggactattttgaacccagagcgatcgtctctctacacagagaggcaggacttccggatccatcagaccagttcctaactcttacggaaaaggctttcgacatatacgcaacaattagctgggagagtcctcgtattgaacgtctgtgctttccggttataactcccgatcccaccaccctacccgtgcgtatagacccacatttcgagcagctggtagataaagttccctttagtaccactgatcgtcgtttcacgtatgcggcaactagtagtccgaggggagaaagctacaagttttcttggttttatcagtggcaaccgagaattctggacaagatgaaaacaagtgatagc

SEQ ID NO: 43 - DNA, 918 bp, Artificial Sequence
  PT161_dna
atgtctggcgcagcagaggtcgaaagagtgtattccgccatggaggagtcagcgggtttattagatgtggcctgttccagggaaaaaatccaacctatccttactgccttccaagacgtattggctgacggggttattgtattctcaatggccaatggccgtcacgctactgagctagacttttctatttcagtaccagcagggcacggagacccatatgcagcagcactagaacatgggctgataccggctactggtcacccagttggggatttgcttgccgatacgcaaaaagctttgcccgtaagcatgtttgcagtggatggcgaagtaacttcaggctttaagaaaacgtatgccttttttccgacggacgacatgcctgggttagcacaattgattgatattccctctatgccgccatcagtcgccgaaaatgcggaacttttcggcagatatggccttgataaggtgcagatgatctccttagattataaaaaaaatcaagtgaatttgtacttttccaatctgaatcccgagttcctacagccagagccagttcaagccatggtacgtgaaatggggctacaattgcctgctgataagggcctggcgttcgcaaagagaagttttgcagtctatcctacactttcttgggattctgccaaaatcgaaagactgtgctttgcggtgatctctacagatccaacgctggcaccggcccaggaacaggcagatttagacttattcagcacttatgctaataacgcaccgtatgcatacgcaggtgaaaagcgtactttggtgtatggccttacgctttccccctccgaagaatattataagctagggtcttactatcagatttccgacatccaacgtaaattgttaaaggctttcgatgctttgactgattga

SEQ ID NO: 44 - DNA, 909 bp, Artificial Sequence
  PT167_dna
atgagcggaggcgtcagtgccgaggaattatacagcgcaattgaggagtcagcgagacttgttgacgcaccctttagtcgtgacaaggtttggcctatcattagtgctttcgagggtggattttctgaaaacggaggggtcatattctcacttcaggctggagatcaagtcgccgaagtagagtactctatccaggtttctcctggaatagaagatccgtacgcccatgcgcttgcaaatggattttttaaagaaaccgatcatccggtacgtgcgctactatccgaagtggttgaattagtgccgacttctgaacattatattgactgtggaatcgtcggtggtttcaagaagatatatgcgaacttcccccacgcaccgcaaaaagtatctaagctagctgaagtccctagcatgccaagggctgtaagtgaaaacctagaatttttcgctagatacgggctagaagatgtcgcacttgtaggcgcggattgcaagaatagaacggtaaatttgtattttcaacttccggcgggaatcgcgggaaatgtagaaccgaaaaccgtacaagaaatgctacgtgagacgggaatgagtgagccctctgaagagatgttggcgtatgccgggaaagcctttagggtatatgtaactctttcttgggactacagcgagattctaaggatctcctttgctccacagcctcgtcgttccgtagatttggcggaactgcccgcccgtttggttcccagaattgctcagtttatgcaagccacgccccacaaatatgctggagcattaataaacgccactgctgccaaatggagcagggagaaagaattgttagacttagcttcctattaccaagtatcccctctacatctaaaggcaattgaggcacaagaatga

SEQ ID NO: 45 - DNA, 888 bp, Artificial Sequence
  PT187_dna
atgccaggtacttcagaggcggcggaactgtgctctacaattgaagaatctgccagactattgaacgtctcttattccagggaccgtgtttggtcacttttgagtgcatacggggacgcattcgctcaccccggtgctgtagttgcttttagggttgctactgcaatgcgtcatgtgcgtgaattggactgtaggtttactacacacccggatgatagagatccttatgctcgtgcgttaagtcatggccttaccccagaaaccgaccaccccgtaggtagtttgctggcagagattcaggggaggtgtccagtggaatctcatggcatagacttcggtgtagttgggggctttaaaaaaatatacgcgttctttacgccggatgatctacagaagacctcaaaactagcggaaattcctgctatgccaagatcccttgcaggccacgttggattttttgccagacatggccttgacgacagggtaggtgtgttcgggattgactatccctctagaactgtgaatgtctatttcaatgacgtccctgcggggtcattcgatccagaaactatcagatccactttgagggagattggaatggccgcccctagcgaaagaatgctaaggctgggtgagaaggcattcggtctgtatgtaactctaggttgggaaagcagcaggattgagcgtatatgttatgccgctgcgacgacggacttgacaacgctaccagttagcgtagaacctgaaatagagaaatttgttagaagtgttccacatggcggtgaggacaggaagttcgtgtatggggttgctttaaccttccagggcgagtattataaactagagagccattaccgttggaagcccggtgcgatggacttcatt

SEQ ID NO: 46 - DNA, 897 bp, Artificial Sequence
  PT188_dna
atgtccggaaaagcaaacatacaaagattgtactcagctgtcgaggaagccgcaggtctattagatattgcctgtagtcgtgatcgtatgtggccgaccttaacagctttcgaggatgtttttgccgacggagcaatagttttcaacatggtcacgtctgggggaaggataggggatctttcttttgacttcactctgccgccgagcgccggtgacccttacgaacttgccctttcacacggcttggtcgatgagactgaccacccgatccgtgctctattttctgacatccaggctaggtgcccacttcaggcttacggagttgattacggtatcacctccggttttcataaaacttacgctttttttccattgggtgatccgcagagtcttgcgcagctggctgatattccctctatgccctccgatttgagtgaacacgtgacttctttcgcggcgtatggtctagcggacaaggtttctgccatagcgattgattatgccaggcgtacctggaatgtatatttcaacggtctaagcgccgaccacgtacagcgtactgccgtactttccatgctatctgaatttggtctaccggagccaagcgcacaattattggagtttatcgagaccagctctgcgctatacccgaccttcggttgggactctagcaaaatcgagagaatatcattctccactcgtacgaccgatcctgcagcgttaccggccagaacggagcccaagctagagcaatttgcccgtaatgcaccgtacgcttatgaaggcgagagggtgttagtgtatgctggggcactatcaccaagcgaagagtattacaagttggcaacctactaccaaatgactgccgcagcgcacgatcgtgtacgttcagctaat

SEQ ID NO: 47 - DNA, 909 bp, Artificial Sequence
  PT199_dna
atggccgggaccaccgagctagaggacttgtactcagtaattgaagcgtccgcgcgtcaacttggggtaacgtgcagcagagaaactgtgtggccggtaatgacgacataccaggatttaataccacaatctgcaatcgcgtttagggtagagacttccgcgaggcgtggtgatgacttcagttgtcgtttcactatgcttccaaaacaaattgacccttatgccctagccttatcaggtggtcttacccctaggacggatcacccggtcggtagcttgagtgccgatatagccgctgcatgtccgattgacaactacggcgttgattttggtgtagtaggaggcttcacgaaaacatttcagttctttccgccggatgagctgcagcctgttagtacactggctggaatagctgcggtaccacctgcacttgctgccaataccgctttctttgaaaggcacggggttgcagatcaggtcgcgctgactgggatggattatgagcataaaacattcaatgtatattttaaaaccccggatggttatcttttggaaccaaaaaatgtggcggcggttctaggagacataggtatgccggagccatcagaacagttactaacccttgcgcgtagcgcgggcggattttacgttactcttaactgggactctcctggagtccaaagaatttgcttcagtgccatgactaaggacccggcggccctaacgggcgggcatttggagccaaaaattgaacagctggctcgtaatgctccgtccgcggatcctggctctgacagagcattcatttgctacgttgcatcttctccagctggtgaatatttcaaattgttgtccttctacagggcacagcccgatgtcgtgaggttgtggagggagtacgaggacaat

SEQ ID NO: 48 - DNA, 648 bp, Artificial Sequence
  PT207_dna
atgttattggagttctctggacatccgatggaaaggctgcttactgacattcctgccgctgttcctgccatatttggaatagatgttggagtcacaactggtttggagaaagtatggcttatgttcccggagttaatgtctgtggaaaggatactgggcttcaccggcatacccgattctgcccgtgctcatactgcgcatctggaaagatatggagggcagatagctatagttgctttggatttcgcaaaccgtacaatgaatctatactctagggtttttgctcccgggcaactaacaagtgcagatatcacaacagttctaacagacttggactttacagccgcgacagaccaggagctgaatctactgggtaacacttttaacctttatagaaccttctcctggacaagtccagccatgcaacgtatctgtttcccagtgtgctatgaagcagccaacttccctacgcatctacacccagtattcgacagattcgtgagtagcgcccctcactccggtgatggccccaggaggttcacattttacgcagcatacggaccggctgatagatactataagatacaggccgaatacacccccaccgagagagtggtattccccggagggagtgaaccgcgtgctcgt

SEQ ID NO: 49 - DNA, 888 bp, Artificial Sequence
  PT209_dna
atgagtgaaacggccgaggttagggaattaagggcggtgattgaggaatcagcgagaatgttggatgtaccgttcgcaggtgaaaaggtgtcctccgttttgggagcatacgaagacgctttcgggcatgatgcgacggtagtcgcttttagagtggctacaggggtcagacacgtcggagagctggactgtcgtttcaccacgcacccagacgaccgtgatccttatgcctccgctcttgccaagggtttaacccccgtcacggatcatccagttggtaacttactttctgatgtccacgctcgttgcccgatagattctcacgggatcgacttcggagtagtaggggggtttaagaaagtatacgccttctttacaccggatgaccttcaagagttgtcaacattcactgcaatgccagcaatgccgaggggactagcggataacgcagacttctttgctagacatggtctggacgataggatcggggtcataggtatagattatcagaacaggaccgtaaacgtgtactttaatgaggtccctgatgcctgctttgaaccggatgctataagatccatgctgagggagatcgggacagcggagccatctgagaggatgctgaggttaggcagagagtctttcgggctatatgtaactctgtcctgggatgctcctaagattgagagaatttgttttgcggtaacgactactgacttagccacactacccgtcaggatagaacccgagatcgaaagattcgtaaaatccgttccatttggcggcgatgatagaaaatttgtatatggggtagcactagcacccgaaggtgaatactacaagctagagagccattacagatggaaacctggagctatggacttcatc

SEQ ID NO: 50 - DNA, 906 bp, Artificial Sequence
  PT211_dna
atgttcactacgacagaaagcgagttagacgatttatatgcagctatcgagaaatcagctcaattagtaaatgttccctgtgccagagatgcggtatggagtactctaactgcctacggcactctactaacgcagagcgtcatatctttcagggtggtcaccgacgcccgtagaagcggggatttagactacaggttcctaaccctacccagggatacagacccgtatgacatcgcattatctaacaagttaattccagaaactgatcatcccgtgggcgctttactggaccaggttcgtaaacagtgtcctatagattcctacgggattgacattggggtagtggggggctttaagaagatatggccttttttccccgcagatggtgtgcaaaaagtatcagagttggcagctctgccggccatgcctccgtcccttggtgatcatgccagaatgttcgccagacatggattggcagacaaggtgggcctgcttggcatagactaccacgataagactattaacgtttacttccccggactatcagctgactgcttcgaaccgggtgccatagtcagcttgcatcgtgacgcaggtcttccagacccatccgatcagttccttagcttgacagagaatgcttttgatatctacgcaactttttcctgggaatctccacgtattgaaagattatgttttccggttatcactcccgacccgagaaccttgccggttcccatcgacccggccttcgaaagattggtagacaatgttcctttcagcaccaccgaccgtagatttacatacgcagctacttcatcaccggatggcgagtcttataaattttcatggttttatcaatggcaacctcgtattttggacaaaatgaaaacatctgattcatga

SEQ ID NO: 51 - DNA, 906 bp, Artificial Sequence
  PT213_dna
atggtgttcacaactactgagtccgagctggaagatttatacaccgcgatcgaagagtccgctagactatggaacgtcccctgtacaccggaagccgtgcgtcctactttgactgcgtatggcgcgatgcttaccgggagtgtaatctctcttagggtcgttaccgatgcaaggaggagcggagacttggactacaggttcctaacactaccgtccggtatagacccttatgacatagctcttagcaatgaattgatctcagagactgatcaccccgtaggtgtactgcttgaccaagttagggaaaggtgtccaattcattcttatggaatcgacatcggagttgtaggtggcttcaagaaaatctggccattctttcccgctgacggtatgcaaaaggtatccgaactagcagaacttccctcaatgccgccagggcttgcagaccatgtaggtatgtttgcgcgtcacggattagaggacaaagtcggtctacttgggatagactaccatgacaaaacgatgaacgtttactttccgggcctaccagcagaatgctttgaaccccgtgccattgtgtccttacatcgtgacgcaggattgccagatccttctgacgagtttttaagcctaactgaaaaagcttttgatatctacgcgaccataagttgggagagcccgcgtatcgagcgtctttgtttcccggtcattacccctgacccaacgactcttcctgtaagaatagatccaagatttgagcaactggtagataaagtcccattccgtaccaccgatcgtcgttttacatacgctgcaacctcaagccccgatggtgagtcatacaaattcagttggttctaccagtggcaaccacgtatattggacagaatgaaaacctccgactcc

SEQ ID NO: 52 - DNA, 906 bp, Artificial Sequence
  PT214_dna
atggttttcactaccacagagtctgaactagacgatctatatgccgccatcgagaaatcagccaggttatgggatgtaccttgtaccagggaggcggtgtggcccaccttatccgcatatggcgctatgttaactaggagtgtgatcagcttaagggtcgttaccgacgcgaggcgtgctggggacctagattaccgttttttgaccctgccttccgacgtggacccctacgggattgcgctggccaacaagttgttgcccgagaccgatcacagcataggaacattgctagaccaagtcagagagagatgccccatccactcatacggtatcgacataggtgtcgttggtgggtttaagaaaatatggccctttttcccagcagatggcatgcagaaggtaagtgaacttgccgaattgccttcaatgccccctagtctagcagaccatgctcgtatgttcgctaggcatggactggaggacaaggtggggttgctgggaatagactatcatgataagacgatgaatgtctactttcctggtcttcctgctgactgttttgagcccagagcgattatggctttacacagggatgcaggactaccggacccgagcgaccaattcttatctttgacagaaaaagcgttcgatatctatgcgaccatatcttgggaatcacccaggatagagcgtttgtgcttcccggtcattacacctgacccaagaaccctaccagtacctattgaacctagattcgagcaccttgttgacgaagtacccatcaatacacctgatcgtcgttttacctacgcggcgacatccagtcccgacggcgaaagttacaaattttcttggttttatcagtggcagcctcgtatccttgaccgtatgaaaacttctgactct

SEQ ID NO: 53 - DNA, 906 bp, Artificial Sequence
  PT216_dna
atgtctaccactacagagtccgcgctggacgacctatacgccgccatagagaaaagcgcccgtttagcgaacgtggcatgtacacctgatgcagtatggccagtattaaatgcctacggacctatgttggcgcaatccgttatatcctttagagtcgttactcaagccagacgttcaggggatttagactacagatttctaaccttgccaaaagcaatagacccttatgatatcgccagatcaaacggcttgatcccagaaacggatcatccaatcggaagcttattggatcaagtgcgtgagcagttccctgttgatagctacgggatcgatataggtgtggcaggaggctttaaaaaaatctggcccttttttcctgcggacggagttcagagagttagcgaacttgctgcattgcccgctatgccggctggccttgccgatcatgcggacatgtttgcccgtcatggtctagctgacaaagtcggacttctgggtatagattaccacgataaaacaatgaatgtctactttcctggccttcccgcagaccactttgctcctgacgcgatagcctcattacaccgtgatgcaggttttccagaaccctccgcacaatttctaagtctaaccgccaaagcctttgacatttacgcgacgttttcttgggagtctagccgtattgagaggttgtgttttccggtcattacgagtgatccagccgcccttgcagtcccaattgacccacgtttcctagaattagcagatcaagtgccttacgccacaaacgataggaggtttacatatgcggcgacaagtagccctgaaggagagtcctataagtttagctggttctatcagtggcaaccacgtatcttagacaagatgaaaacaagcgacagttaa

SEQ ID NO: 54 - DNA, 903 bp, Artificial Sequence
  PT234_dna
atggttacaaatagcgtagacatcgatgatatatattctgcaatagaatattcagcgcgtcttctagaccttccactggaaccggcgaaagttaagggtgctttggcagcgtttgagcctgccttcacggatagtagtgtcgctctacgtatagctactggcgcgagaagggagaaattgatgggctatcgttatataaaatatactggtgacttagatccttatgatacggctttggcagagggtttaatcgagccgggcgatcatccagcggatcgtctgtttcaggatgttaaagaaaggtttccgatagaaggtacggggggagactttgaacttgcggcaggttttcaaaagatttggtgcttctttccatcatccagacctcaaccccttgatgagctgtcacaactgcctagtatgccgccatcagtgggcgagcacctagaactattaggacgttacggattacgtgcagctagtctatttgcggttgattatacgtctcatacgctaaacatttatttcgacggcttgcccgagggcacgtttgcgcctgatagagttagggaattaacagcagagcttggcattccagaacctagtgcggatgttttggagcaatgcgcgaaagcgttcgcggtctatttcactttcagttgggaaaagcctaatatagatagggtttgttttcccgtccttgttccggaccctgaactggtgccaaccaatttgggtcctagtattacgcgtttcgcacagggagtcccatttgcaggcgaggatagaaaatgcatctatgcaaccacattatccgcgcgtgagatttattataaactggaacctttttattactggcaacccaaaatcgtaaatgcgatgcaccttgcgaatccccctgag

SEQ ID NO: 55 - DNA, 945 bp, Artificial Sequence
  PT239_dna
atgacctgcgagatgagagcgtcagagttcgatccagagcaatttcaccaagatattaaggccaccgctgcggtgataggggcgccggttgcgcaccacattacaacagccgtactggacgcatacgcagacaatttcgcacaaggagccactctttggaagactacttcccgtcccggcgatcaactatcataccgtttctttagtcgtctgaagacagacacagttcatcaagcgtcatgtgcaggattattgccagcgggggctcaaccgctgattcctttattaacttcttgggcagctctgtacgatggcgcacctacacaaagctgcgatttcgatgcagggaggggtttagccaagacctggacctattttggcgggttacgtccagctgaagagctgttagcggttcccgcgcttcccgccgcagtccagagccgtttgaaagacttccttccccttggccttgctcatataaggttcgtggcagtggactggaggcatcacacggccaatgtctactttcgtagccaaggaccattggacacgggacaatttgcccgtattcacgccctagctggtggtaagcctcctaccgccgacttagttgacgaggtcttagcctatgtgcccgaggattattgcgtagctattaccttatccctagcttcaggaaaaattgaacgtgtctgcttttatgcgctaaaggtgcctcaagacagattgcctagggtgccggaacgtataagggcctttctgaatgcggctccaagtcatgacgaagatgagtgcaatgtcataggatggagcttcggcccggcgtcagactacataaaggcagagaggagttatcgtggagacatggcgcaagtcttgggtcaatggaattgttttttttacggagatgagggccgtgactatactttgaggaaagccgctacg

SEQ ID NO: 56 - DNA, 915 bp, Artificial Sequence
  PT245_dna
atgtctggggctgctgatgtcgagagagtgtattctgcgatggaaagagcagccggtctacttgacctaacgtgtgcaagagagaagatcttaccaattttaactgcgtataaagaggctctagcagattcagtcatagttttctccatgagtggcggtgatcattccgccgagttggacttcagttttacaataccgtctggcgatgtagatccatacgctttcggaccatctaccggcattcctactgagactgaccaccccattgcctcattgttaagtgatacgggtgaacgttgtcctgtagcaatgtacggcgtagatggcgaggtctccggaggattcaaaaagacctatgccgcttttcctatcaatgaccttttagacttgtcaaaattagttgctgtaccatcaatgcccccagcggttgccgaaaacgccgaattgtttgctaggtacggtctagacaaagtccagggtatttccatagattatcaaagaaaacaagttaatctatactgcggcgatatacccgccgaatcacttgaacccgaaaccgtcagaagtatgttaagggagatgggccttagggagccatctgaggaagggctggagttcgtaagaaaatctttcgccgtgtatccgacattgagctgggacagctctaggatcgagaggatctgttttgctgtgatctccacagacccgaccttagcccctacgagagtagagagtgacgtagccctgttttccaagtatgcaaataacgcgccatatgcatacgccggggaaagacgtactctaatttatggcctggctgttagccccaccaaagaatatatcaaattaggttcctattaccaaatttcagaccaccaaagaaaattagtcaaagctttcgacgctttagaggac

SEQ ID NO: 57 - DNA, 885 bp, Artificial Sequence
  PT249_dna
atgtcagagacctcagaagccgatgagatatatagcgcagttgctgaaacagctggtaggttggggattgcatgtagtagagacaaagtatggccaatattatctgcatacggtgacgcgtttgcgcacgctatgccgcttgcatttcgtatggctactggaccgcagcatgcaggagacgttgattgcagattcattacccatccgaaggaccaaaatccttatcctgcggcactatcagcgggcctaacccctaagacggaccatccagtcggtgcgttacttgcagacatcgaagagaggttccctgtcgatgggtacggcattgactttggggtggtgagtggatttacaaaggtatatgccggcttcgcacctgcagggcttcagaaattgagtgagctgatagatattcctgccatgcctgacagtttggccggtaacttcgatttctttgctcgtcacgggctggacgacaaggtagctttcgtcgctgtggactatttgcatagaacagtgaatgtatactttaacgacgtgccagcagaatgctttgaggcggaccgtgttaggcagatgctaagagagataggtctaccagagccgagcgatagaatgctacgtttagggagtcgtgcgtttggcttgtacacaacattaaactgggactctccgaccattgaaagattctcattcggagtaacaacaaccgacctatcctccttgcccgtgacagtcgagccacagttggaaactttcgcaagatccgttccgtatggaggcgctgacaggaagttcgtatatggggtcgcagcggcggctgagggggaatactgcaaattggaaacccattacaaatggaaccctggggctgtggcctttatc

SEQ ID NO: 58 - DNA, 909 bp, Artificial Sequence
  PT251_dna
atggctggtccagcaggtctagacgaggtgtacgctgccgtagaacagacgagcagactgctagacgtgccatgttcccctgatagattcgaaccagtttggaaggcctttggggaccagttgccggacagccacctggtgttctcaatggcggctggagaggcacacaggggggagctggactttgacttcagtcttagacccgagggcgcagatccgtacaccaccgccctggaacatggctttatcgaaccgactgaccatcccgtgggatcagttttggcggaagtcggtaaaagattcgcaattgccagttacggtgtggaatacggtgtcgtaggaggatttaaaaaaagctacgctttcttcccgctagatgacttcccccccttggcccagtttgccgaagtcccttccgttccgccctgtcttgccgggcacgtagagaccctgacgagactaggtttcgatgataaagtaagcgctattggagtgaactacaggaagaatacgcttaacgtgtacttagccgcttcagccgtcgatacaggtgacaaattagcactgcttcgtgcatttgggtatccggaaccggacgcgagagttcgtcaattcattgagaggagcttctcattataccccacattcaactgggattcctcagcagccgaaaggatatgctttagtgtgaagacgcaacaacctggtgagttgcccgcgccacacgatgaacctacagaggcctttgccagacaagtccctcacgtgtacgagggcggtagggagttcgtgagcgcagtggcattggctccatccggcgcctcatattacaaactggctgcttactaccaaaaggccaggggggccagtaatgcggcctttgcagcaaaaagggaagacgccgctgcc

SEQ ID NO: 59 - protein, 296 aa, Artificial Sequence
  PT12_aa
MPGTSEAAELCSTIEESARLLNVAYSRDRVWSLLSAYGDAFAHPGAVVAFRVATAMRHVGELDCRFTTHPDDRDPYARALSHGLTPETDHPVGSLLAEVQGRCPVESHGIDFGVVGGFKKIYAFFTPDDLQKTSKLAEIPAMPRSLAGNVEFFARHGLDDRVGVFGIDYPSRTVNVYFNDVPAGSFDPETIRSTLREIGMAAPSERMLKLGEKAFGLYVTLGWESSRIERICYAAATTDLTTLPVPVEPEIEKFVRSVPYGGDDRKFVYGVALTPQGEYYKLESHYRWKPGAMDFI

SEQ ID NO: 60 - protein, 340 aa, Artificial Sequence
  PT20_aa
MISVIIPLYNQERYIQDCLASLAAQTMDDFEVIIVDDGSTDSSAELAADFAAQDSRFTLMRQANAGVSTARNRGLDQATGQWVCFVDPDDSVDKDYLATLLAASAEQQDIDIVMSTCVALTDDGEVRQHFFPESFVAHTAQDKERLFHQLIDGAFEQSDGFVTAIGVPWGKLYRRDFLAEHDLRFDPALPRMQDNLFNMEAFQHARAITYLDYAGYRYRVGGLSERTYRNTIKGLYHPAIDRRAELMHAYGLDQVPQLYQAWQVEQVNLYYQELKAAAMLTDGSAAQVARVVRARADTLRQRTAQVDAAVLPRPIRLKYRMLIAPAMTTLAALALARQRH

SEQ ID NO: 61 - protein, 304 aa, Artificial Sequence
  PT24_aa
MSEPAESAQLYSAIEESARLLEVPCSRERVWPILSAYADSLPKAVIALRVATGARYRGDLDWRFTVGSDVDPYAVALSNGLTEKTDHPVGTLLAEISERCPIASYGIDFGVAGGFKKIYLFFPPDGMQSLSTLAELPSMPRSLADNVDLFARRGLGDKVNTFGIDYRHRTVNVYFGGLPDECLEPAGVLSMTRELGLPDPGEQMLRLGRQAFGIYASLGWESSAVERFCFAVMASDSSSLPVPLEPEIEQFLKGLPNNAADSRFVYYAGVSSTGEENYKVQSYYNWQPRMLDQMLLSDSGETRA

SEQ ID NO: 62 - protein, 305 aa, Artificial Sequence
  PT26_aa
MSGTAELEKVYSAIEESARLVGVACSRDNVWPILTAFGESIEDALMVFSLQTGGRHAGELDYSFTAPPGIGDPYPRALSYGFVTETDHPVGSVLSDLQGRWAIREHFVDCGVTGGFKKLYAHFPQDLQPAARLAEIPSVPRAVADNAGLFARYGLDRVAMVGVDYQRRTMNLYFQFTPDGRPEPGALRSMLREIGLHEADEGMLEFASRSMRANITFSWDTSRIVRVAFAPPPGKGLDPAAVPAPIEPHIARFATSAPYAYAGERMNLFGVKWFPDGEFIDVCAYYQLSAGYEPVRLMETHKNPT

SEQ ID NO: 63 - protein, 304 aa, Artificial Sequence
  PT32_aa
MSHTAVVEDVYSAIEDSARLAGVPCSREGIVPILTAYGDTLADAGIVLSVSTNEHPVSELDYTITVPTHGPDPYTTAVEHGFVTRTDHPAAALLPDIQQQVPVSEYFIDGGVVSGFSKIYAHFPFTPLTVEQLAAVESMPRAVAENAGLFARHHLHQAAMIGIDYRRRTVNLYFAQLPEQFGTAENILSLQRELGLPRPDGELLEFARKSFRVYVTLGWDSAQVKRICYAPAPVRGWDPAALPVPVEPETEKFVRGARRTYGGDPIVIAACKWTPEGAYLNLGPYTRVSPLMRTLLRNLTGQEV

SEQ ID NO: 64 - protein, 299 aa, Artificial Sequence
  PT39_aa
MESYMSGTSEADEICSAVTETAGRLGIAFSRDKVWPILSAYGDAFAHAMPLAFRMATGPQHAGDVDCRFITHPKDRNPYPLAVSKGLTPKTSHPVGTLLSEIEERFPIDGYGIDFGVVNGFTKVYAGFAPQDLQNASKLVEIPAMPRSLAGNFDFFVRHGLDDKVAFVAVDYLHRTVNVYFNDVPAACFESDGIRRMLRDLGLPGPSDRMLGIGGQAFGLYITLNWDSPAIERFCFGVTTTDLSSLPVSIEPQLEKFAHCVPYGGADRKFVYGVAAAPEGEYYKLETHYKWNPGTVAFI

SEQ ID NO: 65 - protein, 297 aa, Artificial Sequence
  PT42_aa
MDEVYAAVEQTSRLLDVPCSPDRFEPVWKAFGDQLPDSHLVFSMAAGEAHRGELDFDFSLRPEGADPYTTALEHGFIEPTDHPVGSVLAEVGKRFAIASYGVEYGVVGGFKKSYAFFPLDDFPPLAQFAEVPSVPPCLAGHVETLTRLGFDDKVSAIGVNYRKNTLNVYLAASAVDTGDKLALLRAFGYPEPDARVRQFIERSFSLYPTFNWDSSAAERICFSVKTQQPGELPAPHDEPTEAFARQVPHVYEGGREFVSAVALAPSGASYYKLAAYYQKARGASNAAFAAKREDAAA

SEQ ID NO: 66 - protein, 305 aa, Artificial Sequence
  PT45_aa
MSGETDAEELCSAIEETARLVGAPCSREKIWPILTEYRSGFAEGGVVFSAQAGENHAGELDYGLAVPPRIDDPYAHALAHGFVTETDHPVAALLSDIRERCAVTEHFADCGVVGGFRKLYAHFPRDLQKVSEIADIPSMPRAVAENVGLFTRYGLENVVMVGVNYKNKTVSLYFQFTAEGRPRPSAIRSMLGDIGMTEPNERMLDFASNSFRANITLSWDSPKILRVAFAPPPGAGLNLSTVPIPTGPHLEDFVTRAPRAYDGERMNLFAVKWTQDKEFLEVCSYYQLPAGYEPIRQMEIHKEQG

SEQ ID NO: 67 - protein, 316 aa, Artificial Sequence
  PT47_aa
MIGIDFLECLVSEGIEAEGLYSAIEESARMVDAPFSRDKVWPILSAFGGGFSDAGGVIFSLQAGKDVPEMEYSAQISAEVGDPYAHALATGVLNETDHPVSTVLAEIVSLAPTSEHYIDCGIVGGFKKIYANFPHDQQKVSRLADLPAMPRAVGANAEFFDRYGLDNVALIGVDYRNKTINLYFQAPAETAGNLDPKTVSAMLRETGMSTPSEEMVAYADRAYRIYATLGWDSPEVMRLAFAPQPRRSIDLAELPARLEPRIEQFMRATPHKYPGALINATAAKWSKKHEVLDLAAYYQVSALHLKAIQAEEGQSS

SEQ ID NO: 68 - protein, 343 aa, Artificial Sequence
  PT48_aa
MSRSFHAFLFNCFDCNKENIKMTIVNRIRTDVVNVAKSFGAEYSEAVIDQIFQGFGEKFTNTGFAIRVQNKRNQKVDCNIRYGEAKENCLAWDIARESGLLSDQGHPVDTLIQEMFQAIPAIAYGADFDINYGLVKIWHLPKIVPVEEAFKIPSLPKSVNAHIDFFKKYHLDALCALTVDYRNKSTNLYFDAHHPEQRTTQFYKNILQSQQFEVPSDEVLEILVNCPEIAVTFNWSSPGIERMCFYTAFVNRETVPQHINPVLKKFAQEAPALLDNPGFLVGWSFGPDAKKGTYIKIDVDYHGLVVPSFFHMHNLPLPIPEANSVFDLPSSDTEDKLNSIVMS

SEQ ID NO: 69 - protein, 308 aa, Artificial Sequence
  PT49_aa
MNDVNRIRTDIVNVATTFGAEYSEKVLDEVFQVFGEQFADNSFMIRTSNKQPDKLGCYFRYHEEDESHLGLAWDIARKSGLLSDQGRPVDQLIPEICETFPIMADGVDFDVKHGLAKIWQSIKGVVPVQDAFKLSLPPSVNAHADFLKNHHLDALYAFGVDYHHSSVNLYFDTYHPKHHTSEYYENLLQDLQFQPPSDEVLELLANNGEIALTFNFASPRIERLCFYLPFLNREAVPQNLLTPLLKKYINEAPALVDNPGFILGWSFGPQGGKGTYTKVDVDYHGRTVPLFIKVHSQPLPKAADFALA

SEQ ID NO: 70 - protein, 309 aa, Artificial Sequence
  PT50_aa
MNDVNRIRTDIINVAKTFGAEYSEKVLDEVFQVFGEQFADNSFMIRTSNKQPDKLGCYFRYHEEDESQLGFAWDIARKSGLLSDQGRPVDQLIPEICETFPIMADGVDFDVKHGLAKIWQSIKGVVPVQDAFKLSLPASVTAHSDFLKNHHLDALYAFGVDYHHSSVNLYFDTYHPKHHTSEYYKNLLQDLQFQPPSDELLELLANNGEIALTFNFDSPRIERLCFYLPFLNREAVPQNLLNPLLKKYINEAPALVDNPGFILGWSFGPQGGKGTYTKVDVDYHGRTVPLFMKVHSQPLPKAADFALAQ

SEQ ID NO: 71 - protein, 380 aa, Artificial Sequence
  PT55_aa
MSEQVCEILWSKKMQEYFNSLTPNMPEGLRDRYIGYVNENARARGASEVTELDIITALLRNTPVFFRQNISNIPKDIKVDLSSLTKRDLALMSDDIEKAAKIAEVGCNKELVNKILNVYEEQFSHPQVAVSFRTTTKPVEKRSLDVRYVDVWTSHDPYAMAIENGLLVKSGHPVDNLFYDIKSNFPIMGYGVDFGVLNGFAKIWMRIPTHLPVPLEKLQLIPSFPDSLKNYISLLSKYSMDRIIMVGIDYIHKSTNIYFVKRYYGDLSTETVTSLISELGFPVPSNELIEECAHALFFYCTFTWDSPKIERLSFHRVAHDQSQVPVHLHPFLEKYSLNAPILGDKRKFMYTVALSPKGNYIKLESDYSSGIMADALVETY

SEQ ID NO: 72 - protein, 299 aa, Artificial Sequence
  PT58_aa
MSQTAQPAGLYPAIEEAARLLDVPCSREKVEPVLTAYGDTLDQAVIAFRVATGARHAGELDCRFTMLPKDVDPYALALSRGLTAKTDHPVGSLLADLQARFPVDSHGIDFGVVGGFKKSWSFFPPDDLQQLAQLAQLPAMPRSLAANLDFFTRHDLHDKASLIGIDYRHKTVNIYFGQPPAACFVPENVTSMLHELGLPAPSEQMLRLGEQAFGIYVTLSWDSLKVERLCLAVMTPDPTALPVEIEPRIEQFIKSAPHTDPEEDRRFVYAVTASPAGEYFKLQSYYQWRPRMLNLMLLD

SEQ ID NO: 73 - protein, 300 aa, Artificial Sequence
  PT62_aa
MSTTESELDDLYAAIEKSARLVNVPCARDAVRPTLTAYGTMLTQSVISFRVVTDARRSGDLDYRFLTLPSDVDPYNIALSNNLIPETDHPIGALLDQVRKQCPIDSYGIDIGVVGGFKKIWPFFPADGMQKVSELAALPSMPPSLADHARMFARHGLEDKVGLLGIDYHDKTMNVYFPGLPADYFEPRAIVSLHREAGLPDPSDQFLTLTEKAFDIYATISWESPRIERLCFPVITPDPTTLPVRIDPHFEQLVDKVPFSTTDRRFTYAATSSPRGESYKFSWFYQWQPRILDKMKTSDS

SEQ ID NO: 74 - protein, 301 aa, Artificial Sequence
  PT69_aa
MSTTTESALDDLYVAIEKSARLANVPCTRDAVWPVLTAFGTMLTRSVISFRVVTEARRAGDLDYRFLTLPKDIDPYDIARSNGLIRQADHPIGSLLDQVREQGPVDSYGIDVGVAGGFKKIWPFFPADDVRNVAELAALPSMPAGLADHAGMFARHGLADKVGLLGIDYHDKTMNVYFPGLPAEHFAPEAVAALHRDAGFPEPSAQFLALTAKAFDIYATFGWESSRIERLCFPVITPDPATLPIPIDPRFQELADNAPFATNDRRFTFAATSSPAGESYKFSWFYQWQPRILDKMKTSDS

SEQ ID NO: 75 - protein, 308 aa, Artificial Sequence
  PT83_aa
MSEAADVERVYAAMEEAAGLLGVACARDKIYPLLSTFQDTLVEGGSVVVFSMASGRHSTELDFSISVPTSHGDPYATVVEKGLFPATGHPVDDLLADTQKHLPVSMFAIDGEVTGGFKKTYAFFPTDNMPGVAELSAIPSMPPAVAENAELFARYGLDKVAMTSMDYKKRQVNLYFAELSAQTLEAESVLALVRELGLHVPNELGLKFCKRSFSVYPTLNWETGKIDRLCFAVISNDPTLVPSSDEGDIEKFHNYATKAPYAYVGEKRTLVYGLTLSPKEEYYKLGAYYHITDVARGLLKAFDSLEDG

SEQ ID NO: 76 - protein, 380 aa, Artificial Sequence; identical to SEQ ID NO: 71
  PT117_aa

SEQ ID NO: 77 - protein, 311 aa, Artificial Sequence
  PT118_aa
MSENAELERIYSVIEETAQLVDVACSRAKVWPVLTTFGDTLAQAAIAFRVATGARYVGELDCRFSIRMDVDPYSTALSNGLTEETDHPIGALLSEIHDRFPIETLGVDFGVVGGFRKIYAFFPGEDLQSLSKAADMPSMPRSLAGNLDFFTRYGLSERVTGISIDYPSRTTNVYFGWTPADRFDTKTVLSMLRDLELPDPSEQMLTVAKEAFGMYLTLSWDSPKILRFCFPMPTPDPTTLPVQLEPKIEQFTRGVSRGSAMGKYVYAATSTPDGEYYKLSSYYQWRPQVIDLPTGWRADSTQSPEPIADPV

SEQ ID NO: 78 - protein, 309 aa, Artificial Sequence
  PT129_aa
MNDVNRIRTDIINVAKTFGAEYSEKVLDEVFQVFGEQFADNSFMIRTSNKQPDKLGCYFRYHEEDESQLGLAWDIARKSGLLSDQGRPVDQLIPEICETFPIMADGVDFDVKHGLAKIWQSIKGVVPVQDAFKLSLPASVTTHSDFLKNHHLDALYAFGIDYHHSSVNLYFDTYHPKHHTSEYYKNLLQDLQFQPPSDELLELLTNNGEIALTFNFASPRIERLCFYLPFLNREAVPQNLLNPLLKKYINEAPALVDNPGFILGWSFGPQGGKGTYTKVDVDYHGRTVPLFMKVHSQPLPKAADFALAQ

SEQ ID NO: 79 - protein, 310 aa, Artificial Sequence
  PT131_aa
MVPKDADPRSSVYSAIEEAAGLMGAPCSRERVWPILTAYGDGISEAGIVFSVQTGERHAGELDYTITVPADGPDPYTSALSNGFLEATQHPVGTLLSDIRARCHISEYFIDCGVVGGFNKVYAHFPHDPLSVERLAEVPSLPRSLADNLGFFLRHALRDVAMIAIDYRKKTVNLYFAQLSAECLRSANIRAMLRESGLSELDGPMLDFALGSFRIYVTLAWDSAGVERISFASLMSSGWVNAALSEFPVRIEPEIERFVKNAPQAYSGDRVRILAIKSSPGDECLNFGSYYQISPVVRNLLAARAGDAEQ

SEQ ID NO: 80 - protein, 300 aa, Artificial Sequence
  PT150_aa
MPTTESELDDLYAAIEKSARISNIPCTPDAVRPALTAFGAILTQSVMSFRVVTEARRAGDLDYRFLTLPSDIDPYRIAVSHNLIPDTDHPIGTLLDQVREHCPVDSYGIDLGVVGGFKKIWPFFPADSVQKVSDLATLPAMPAGLADHADMFARHGLEDKVGLLGIDYHDKTMNVYFPGLPAEHFQPDAIVALHRDAGFAEPSEEFLSLTRQAFDIYATFGWESNRIERLCFPVITADPTSLPVPLEPRFADLLDRVPITTNERRFTYAATSSPGGESYKFSWFYRWQPRILDKMKTTDS

SEQ ID NO: 81 - protein, 300 aa, Artificial Sequence; identical to SEQ ID NO: 73
  PT151_aa

SEQ ID NO: 82 - protein, 305 aa, Artificial Sequence
  PT161_aa
MSGAAEVERVYSAMEESAGLLDVACSREKIQPILTAFQDVLADGVIVFSMANGRHATELDFSISVPAGHGDPYAAALEHGLIPATGHPVGDLLADTQKALPVSMFAVDGEVTSGFKKTYAFFPTDDMPGLAQLIDIPSMPPSVAENAELFGRYGLDKVQMISLDYKKNQVNLYFSNLNPEFLQPEPVQAMVREMGLQLPADKGLAFAKRSFAVYPTLSWDSAKIERLCFAVISTDPTLAPAQEQADLDLFSTYANNAPYAYAGEKRTLVYGLTLSPSEEYYKLGSYYQISDIQRKLLKAFDALTD

SEQ ID NO: 83 - protein, 302 aa, Artificial Sequence
  PT167_aa
MSGGVSAEELYSAIEESARLVDAPFSRDKVWPIISAFEGGFSENGGVIFSLQAGDQVAEVEYSIQVSPGIEDPYAHALANGFFKETDHPVRALLSEVVELVPTSEHYIDCGIVGGFKKIYANFPHAPQKVSKLAEVPSMPRAVSENLEFFARYGLEDVALVGADCKNRTVNLYFQLPAGIAGNVEPKTVQEMLRETGMSEPSEEMLAYAGKAFRVYVTLSWDYSEILRISFAPQPRRSVDLAELPARLVPRIAQFMQATPHKYAGALINATAAKWSREKELLDLASYYQVSPLHLKAIEAQE

SEQ ID NO: 84 - protein, 296 aa, Artificial Sequence
  PT187_aa
MPGTSEAAELCSTIEESARLLNVSYSRDRVWSLLSAYGDAFAHPGAVVAFRVATAMRHVRELDCRFTTHPDDRDPYARALSHGLTPETDHPVGSLLAEIQGRCPVESHGIDFGVVGGFKKIYAFFTPDDLQKTSKLAEIPAMPRSLAGHVGFFARHGLDDRVGVFGIDYPSRTVNVYFNDVPAGSFDPETIRSTLREIGMAAPSERMLRLGEKAFGLYVTLGWESSRIERICYAAATTDLTTLPVSVEPEIEKFVRSVPHGGEDRKFVYGVALTFQGEYYKLESHYRWKPGAMDFI

SEQ ID NO: 85 - protein, 299 aa, Artificial Sequence
  PT188_aa
MSGKANIQRLYSAVEEAAGLLDIACSRDRMWPTLTAFEDVFADGAIVFNMVTSGGRIGDLSFDFTLPPSAGDPYELALSHGLVDETDHPIRALFSDIQARCPLQAYGVDYGITSGFHKTYAFFPLGDPQSLAQLADIPSMPSDLSEHVTSFAAYGLADKVSAIAIDYARRTWNVYFNGLSADHVQRTAVLSMLSEFGLPEPSAQLLEFIETSSALYPTFGWDSSKIERISFSTRTTDPAALPARTEPKLEQFARNAPYAYEGERVLVYAGALSPSEEYYKLATYYQMTAAAHDRVRSAN

SEQ ID NO: 86 - protein, 303 aa, Artificial Sequence
  PT199_aa
MAGTTELEDLYSVIEASARQLGVTCSRETVWPVMTTYQDLIPQSAIAFRVETSARRGDDFSCRFTMLPKQIDPYALALSGGLTPRTDHPVGSLSADIAAACPIDNYGVDFGVVGGFTKTFQFFPPDELQPVSTLAGIAAVPPALAANTAFFERHGVADQVALTGMDYEHKTFNVYFKTPDGYLLEPKNVAAVLGDIGMPEPSEQLLTLARSAGGFYVTLNWDSPGVQRICFSAMTKDPAALTGGHLEPKIEQLARNAPSADPGSDRAFICYVASSPAGEYFKLLSFYRAQPDVVRLWREYEDN

SEQ ID NO: 87 - protein, 216 aa, Artificial Sequence
  PT207_aa
MLLEFSGHPMERLLTDIPAAVPAIFGIDVGVTTGLEKVWLMFPELMSVERILGFTGIPDSARAHTAHLERYGGQIAIVALDFANRTMNLYSRVFAPGQLTSADITTVLTDLDFTAATDQELNLLGNTFNLYRTFSWTSPAMQRICFPVCYEAANFPTHLHPVFDRFVSSAPHSGDGPRRFTFYAAYGPADRYYKIQAEYTPTERVVFPGGSEPRAR

SEQ ID NO: 88 - protein, 296 aa, Artificial Sequence
  PT209_aa
MSETAEVRELRAVIEESARMLDVPFAGEKVSSVLGAYEDAFGHDATVVAFRVATGVRHVGELDCRFTTHPDDRDPYASALAKGLTPVTDHPVGNLLSDVHARCPIDSHGIDFGVVGGFKKVYAFFTPDDLQELSTFTAMPAMPRGLADNADFFARHGLDDRIGVIGIDYQNRTVNVYFNEVPDACFEPDAIRSMLREIGTAEPSERMLRLGRESFGLYVTLSWDAPKIERICFAVTTTDLATLPVRIEPEIERFVKSVPFGGDDRKFVYGVALAPEGEYYKLESHYRWKPGAMDFI

SEQ ID NO: 89 - protein, 301 aa, Artificial Sequence
  PT211_aa
MFTTTESELDDLYAAIEKSAQLVNVPCARDAVWSTLTAYGTLLTQSVISFRVVTDARRSGDLDYRFLTLPRDTDPYDIALSNKLIPETDHPVGALLDQVRKQCPIDSYGIDIGVVGGFKKIWPFFPADGVQKVSELAALPAMPPSLGDHARMFARHGLADKVGLLGIDYHDKTINVYFPGLSADCFEPGAIVSLHRDAGLPDPSDQFLSLTENAFDIYATFSWESPRIERLCFPVITPDPRTLPVPIDPAFERLVDNVPFSTTDRRFTYAATSSPDGESYKFSWFYQWQPRILDKMKTSDS

SEQ ID NO: 90 - protein, 302 aa, Artificial Sequence
  PT213_aa
MVFTTTESELEDLYTAIEESARLWNVPCTPEAVRPTLTAYGAMLTGSVISLRVVTDARRSGDLDYRFLTLPSGIDPYDIALSNELISETDHPVGVLLDQVRERCPIHSYGIDIGVVGGFKKIWPFFPADGMQKVSELAELPSMPPGLADHVGMFARHGLEDKVGLLGIDYHDKTMNVYFPGLPAECFEPRAIVSLHRDAGLPDPSDEFLSLTEKAFDIYATISWESPRIERLCFPVITPDPTTLPVRIDPRFEQLVDKVPFRTTDRRFTYAATSSPDGESYKFSWFYQWQPRILDRMKTSDS

SEQ ID NO: 91 - protein, 302 aa, Artificial Sequence
  PT214_aa
MVFTTTESELDDLYAAIEKSARLWDVPCTREAVWPTLSAYGAMLTRSVISLRVVTDARRAGDLDYRFLTLPSDVDPYGIALANKLLPETDHSIGTLLDQVRERCPIHSYGIDIGVVGGFKKIWPFFPADGMQKVSELAELPSMPPSLADHARMFARHGLEDKVGLLGIDYHDKTMNVYFPGLPADCFEPRAIMALHRDAGLPDPSDQFLSLTEKAFDIYATISWESPRIERLCFPVITPDPRTLPVPIEPRFEHLVDEVPINTPDRRFTYAATSSPDGESYKFSWFYQWQPRILDRMKTSDS

SEQ ID NO: 92 - protein, 301 aa, Artificial Sequence
  PT216_aa
MSTTTESALDDLYAAIEKSARLANVACTPDAVWPVLNAYGPMLAQSVISFRVVTQARRSGDLDYRFLTLPKAIDPYDIARSNGLIPETDHPIGSLLDQVREQFPVDSYGIDIGVAGGFKKIWPFFPADGVQRVSELAALPAMPAGLADHADMFARHGLADKVGLLGIDYHDKTMNVYFPGLPADHFAPDAIASLHRDAGFPEPSAQFLSLTAKAFDIYATFSWESSRIERLCFPVITSDPAALAVPIDPRFLELADQVPYATNDRRFTYAATSSPEGESYKFSWFYQWQPRILDKMKTSDS

SEQ ID NO: 93 - protein, 301 aa, Artificial Sequence
  PT234_aa
MVTNSVDIDDIYSAIEYSARLLDLPLEPAKVKGALAAFEPAFTDSSVALRIATGARREKLMGYRYIKYTGDLDPYDTALAEGLIEPGDHPADRLFQDVKERFPIEGTGGDFELAAGFQKIWCFFPSSRPQPLDELSQLPSMPPSVGEHLELLGRYGLRAASLFAVDYTSHTLNIYFDGLPEGTFAPDRVRELTAELGIPEPSADVLEQCAKAFAVYFTFSWEKPNIDRVCFPVLVPDPELVPTNLGPSITRFAQGVPFAGEDRKCIYATTLSAREIYYKLEPFYYWQPKIVNAMHLANPPE

SEQ ID NO: 94 - protein, 315 aa, Artificial Sequence
  PT239_aa
MTCEMRASEFDPEQFHQDIKATAAVIGAPVAHHITTAVLDAYADNFAQGATLWKTTSRPGDQLSYRFFSRLKTDTVHQASCAGLLPAGAQPLIPLLTSWAALYDGAPTQSCDFDAGRGLAKTWTYFGGLRPAEELLAVPALPAAVQSRLKDFLPLGLAHIRFVAVDWRHHTANVYFRSQGPLDTGQFARIHALAGGKPPTADLVDEVLAYVPEDYCVAITLSLASGKIERVCFYALKVPQDRLPRVPERIRAFLNAAPSHDEDECNVIGWSFGPASDYIKAERSYRGDMAQVLGQWNCFFYGDEGRDYTLRKAAT

SEQ ID NO: 95 - protein, 305 aa, Artificial Sequence
  PT245_aa
MSGAADVERVYSAMERAAGLLDLTCAREKILPILTAYKEALADSVIVFSMSGGDHSAELDFSFTIPSGDVDPYAFGPSTGIPTETDHPIASLLSDTGERCPVAMYGVDGEVSGGFKKTYAAFPINDLLDLSKLVAVPSMPPAVAENAELFARYGLDKVQGISIDYQRKQVNLYCGDIPAESLEPETVRSMLREMGLREPSEEGLEFVRKSFAVYPTLSWDSSRIERICFAVISTDPTLAPTRVESDVALFSKYANNAPYAYAGERRTLIYGLAVSPTKEYIKLGSYYQISDHQRKLVKAFDALED

SEQ ID NO: 96 - protein, 295 aa, Artificial Sequence
  PT249_aa
MSETSEADEIYSAVAETAGRLGIACSRDKVWPILSAYGDAFAHAMPLAFRMATGPQHAGDVDCRFITHPKDQNPYPAALSAGLTPKTDHPVGALLADIEERFPVDGYGIDFGVVSGFTKVYAGFAPAGLQKLSELIDIPAMPDSLAGNFDFFARHGLDDKVAFVAVDYLHRTVNVYFNDVPAECFEADRVRQMLREIGLPEPSDRMLRLGSRAFGLYTTLNWDSPTIERFSFGVTTTDLSSLPVTVEPQLETFARSVPYGGADRKFVYGVAAAAEGEYCKLETHYKWNPGAVAFI

SEQ ID NO: 97 - protein, 303 aa, Artificial Sequence
  PT251_aa
MAGPAGLDEVYAAVEQTSRLLDVPCSPDRFEPVWKAFGDQLPDSHLVFSMAAGEAHRGELDFDFSLRPEGADPYTTALEHGFIEPTDHPVGSVLAEVGKRFAIASYGVEYGVVGGFKKSYAFFPLDDFPPLAQFAEVPSVPPCLAGHVETLTRLGFDDKVSAIGVNYRKNTLNVYLAASAVDTGDKLALLRAFGYPEPDARVRQFIERSFSLYPTFNWDSSAAERICFSVKTQQPGELPAPHDEPTEAFARQVPHVYEGGREFVSAVALAPSGASYYKLAAYYQKARGASNAAFAAKREDAAA

SEQ ID NO: 98 - protein, 2098 aa, Artificial Sequence
  Protein sequence for OAS2 (Orsellinic acid synthase) Type 1 PKS
MTQSLPYNAFLFDGQGTPASFAPQTIATALRDAELPLGSALLLACHQAFLHEFQSLSPDEQSVSGLDIPRFSSPRALLHISLDLRSNAIVANTHLFLVQVLRYLAAAGVSSPGSSGFSTEASNFIGFSSGMFAATVVAASQDIPSFLVNAVETFRLAFWLGLRSQQFASSTLSLQPSSDASAPWSFVFFGAPRDEVQRAVDSYNQNQPSGPVLHLTAVTHATCVSVSGRPEALSEFRANHLLSTSSKSAAIHTLYHSSQTGEVKDRIMADIARRNIRFPTYDALKHSLRSTVDGEIISGANHGFSPTLVEAIVDMTMLHPVNFDRVIAAISSDPAVKDRSLRLMNIGPGTSLWRGMARSLQDLDITVVDWTSIADSEGPSNPVPRALVDSAPSREPIAIIGMAVNLPGAPDINGLWEVLEKGLNTVSEIPKRRFDVSKYTTPSKDLKRVMKTRFGNFIESPDAFDNVFFRVSPREARSMDPQQRVLLQVTYHALENAGYVPNATPCFNPDTFATYVGVATNDYVQNLRNDIDVYYSTGTLQSFLSGKVSYAFGFSGPSLVIDTACSSSMVSIYQACRALNNGDCNAAIAGGVNVIASPDMYFGLDRAHFLSSTGQCRPWDSSADGYCRSEGCGMFVLKRLSDALAEQDNILGVIRGIEVNQSANAESITHPHVPTQTQLFKKLLASTGIQPSRISVIEAHGTGTKAGDPTELESLRNVFAVNRTAENQLHITSVKANIGHAEAASGAAGLAKLLLMMRKRTIPAVISLKQLNPRIPELSIDGTCIDTRLTPWSAPADGDKRLALLNNFGAAGSNGALILEEPPVPQSSGTASAPTAVVVGFSCDSEAAAAELRRSYLQYVDESVHDQLSLADFAYTATARRKLYRYRVAASGKTKAELCANLKDAKMIEVEKSAGKTVFVFSGQGGQYVGMGANLYKSTPAFRRIVDECHSKLISWGYPSILSVIRPSGDADSASADSFEVFQSAVFVLEYALASLWMSWGVRPDAVAGHSLGEYAALVTANVITIDDALKLVAERARLMSQKCAPKITGMLAVRVSPSKMTEILKSANYQSLSIACYNSTADCVLGGNLDELKLLQGELKQAGNKTILLNVPYGYHTSAMSPILQDLCQLGNQVKISAPTIPIVSNVYGVVVAPGDHSKFTPDYFSRHCGEPVQFEQGVTSLMGIEEFAKVSAWIEIGPHPTTLPMLRSIPLASQNTLHLPSLRKDILDWETLCGTLSSLYCAQTSLSWRSVFTDLAQTARLVDLPSYPFADTRFWVQYEDERPTQSLDAPVTKAAAPPRFSLLGTCISVPPPDVEEAAVFETPIEILSHLIEGHLVAGFALCPASVYHELALGAAHILLEKTGKLDPDVVLDLSEIVYANPLVYSSEVRRTIRVEVTPYERDEKHTGKFTIGSWVDTPSDNQAHCSGFFVKRSATYASSKLALSKTMIERRIQPMQNGSPASETFFTQTAYNVIFSRVVQYSKAYHTMKSVTIDPNGVDAFAVVKLPPEASSGQFVVHPIFMDTLLHVAGFVINCNAGQNEAFICSQVDKAKAIPELINPSTTYGVYCNIGFLSETLAVADAYAIELDGTAGNVVAHMKRMRFRKLRMPGFKSLLARVARGSSQTHAAPAISQPGNRVPAATQGWEDKLIGLIAETCDVNVADIKLQSRLSDLGIDSLMSIELAGRIQALLPSCDIDANAVASFNRVGDLVLELKDKCGSSTSASSDTLHDSDIVSPPPTQVSSPRTPDSLLKIKEIMSSILGVAMRDLSEDQDLERLGLDSLTSIEARHALQSSLNVNLAEDVFMICKTIRDIDTAVSAMLSPPSDVPKVHPKHTEQSEKPALLGTEINPVRLQEGSSAGTLPLFLIHDGSGMAHPYARLSPLGRPLWGIHNPKLPTGDAWDGGVLEMASHYVELIKAASGTTGCIVGGWSFGGVLAFEVARQLIRSGIRVPGIVLIDSPHPLTKSPLPDSLIENVIGGKGSTNKLTELVRAQMRHATRALISYDLSQSPASGVLPPKAVMLRSQEAFSLPSVETESAAFLAERGDPASSVAQWEKVLGVSVPVIDIPGNHFEPFEPRYVGVVSEKLKEAVAMLD

SEQ ID NO: 99 - DNA, 7717 bp, Artificial Sequence
  OAS2
cccaaagctaagagtcccattttattcttctatatgtatattttcgatactctaaaccaccctacaatgtagccctatactaaatctgctcaattttcagcttctacaagtgactcgagaccacgtggaaagatccaactactccagcacaacgattcaatataatcgattgctccactcataagaggcaagaacaagcttcaacttttggtaagccgccgtttataaacagggaagatgtcctttgtcaagggaggcacagagcatggccaatttggcaaattgcggattagaagccgccgagcgggtgacagccctccgaaggaagactctcctccgtgcgtcctcgtcttcaccggtcgcgttcctgaaacgcagatgtgcctcgcgccgcactgctccgaacaataaagattctacaatactagcttttatggttatgaagaggaaaaattggcagtaacctggccccacaaaccttcaaatgaacgaatcaaattaacaaccataggatgataatgcgattagttttttagccttatttctggggtaattaatcagcgaagcgatgatttttgatctattaacagatatataaatgcaaaaactgcataaccactttaactaatactttcaacattttcggtttgtattacttcttattcaaatgtaataaaagtatcaacaaaaaattgttaatatacctctatactttaacgtcaaggagatgactcaatccttaccgtacaacgcgtttctatttgacggtcaggggacaccggcgagcttcgcaccccagacgatagctacagccctacgtgatgctgagttgccacttggatctgctcttcttttagcttgccatcaagcattcctgcatgaattccaatctttaagtcctgacgagcagtccgtctcaggcctagacataccaaggttttctagtcccagagcgttgctacacatctcacttgatctaagatcaaatgctatagtagccaatacccatttatttttagttcaagtcttgcgttatctagccgctgccggggtgtcatcaccaggaagctccggtttcagcactgaagcgagcaactttatcgggttttcctccggtatgttcgctgccaccgtagtcgcggcgtctcaggacattccttcattccttgtgaacgctgtcgagacttttagattagcgttttggcttggcttgaggagtcagcaatttgcgtcaagcaccctgagcctgcaacctagttccgacgcatctgccccctggagtttcgtgttctttggagcccctagagatgaagtacaaagggccgttgatagctacaaccagaatcagccaagcgggcctgtattgcatcttactgccgttacgcacgcaacatgcgtgtccgtcagtgggaggccggaagcactgagcgagtttagagcgaaccatctacttagcacaagcagcaaaagcgcagcaattcacacactgtaccattcctcccaaactggcgaggtgaaagacagaatcatggccgatattgcgaggaggaatataaggtttccaacatatgacgccttgaagcatagcctgagaagcaccgtcgatggcgagatcatcagcggggcgaatcacggattctcacctacactggtcgaagccatagtagatatgaccatgctgcatccagttaactttgaccgtgtaatagctgccataagcagtgatcctgctgttaaggaccgttcattgcgtctaatgaatatagggcctggcactagtctgtggcgtggcatggcgcgttctcttcaggatttagacattacggttgttgactggacttccattgctgattcagaagggccttcaaacccagtccctcgtgcgttagtagacagtgcaccgtccagagagccgatagccatcataggaatggcagtgaacttaccgggagcccctgatattaatgggttgtgggaggtgttggaaaagggcctaaatacagtcagcgaaataccaaagaggagattcgatgtgagcaagtatacaactccgagcaaagatttaaaaagggttatgaaaaccaggttcgggaactttattgaaagtcctgacgcgttcgacaacgtgttcttcagagtatctcctagggaagcgaggtctatggatccgcaacaaagggttttgttgcaggtgacataccacgctctggaaaatgcgggatacgtacctaacgcgacgccttgctttaacccagatacttttgcaacttacgttggcgtagcaacaaacgattacgtccaaaatttgaggaatgacatcgatgtttattactctacaggtactttgcagtcttttctgtcaggcaaagtgtcttatgcctttgggttctctgggccatccctagtcatcgatacagcatgtagctcttccatggtatccatataccaagcatgcagagcgttaaacaacggtgactgtaatgccgcaatagctgggggggtgaacgtgattgcaagtccggacatgtatttcggcctagatagagcccactttctaagctcaacaggccaatgccgtccatgggactcctccgcagatggctactgccgtagcgagggttgtggtatgtttgttctaaaacgtctgagcgacgccctagctgagcaggataatatactaggcgtgattagaggtatagaagtgaaccagagcgccaatgcagagtctataactcatcctcacgttcctacccagacgcagttattcaagaaactactagcatccactggtatccaaccctcaagaatttcagttattgaagctcatggcacaggtactaaagccggagaccctacagaactagagagcttgagaaatgttttcgcggtaaatcgtacggccgaaaaccaattgcatataacaagtgttaaagccaatataggacacgctgaggccgcatctggtgcagcagggttggcgaagctgttgcttatgatgagaaaaagaactattcccgcggtgatcagccttaagcaacttaacccgcgtatcccggaattaagtatagacggaacttgtatcgacaccaggttaacgccatggtctgcacccgcggatggcgataaaagacttgcgctattaaacaatttcggagcggctggaagtaacggagcgttgatattagaagaacctcccgtacctcagagctccggtactgccagtgcgccaactgctgtagtagtgggctttagttgtgatagtgaggccgctgctgcggagcttaggcgttcttacttgcaatatgtagatgagagtgtccatgaccaattaagtttagcagatttcgcctataccgctactgcgcgtagaaagctatatagatatagagtggctgcaagcggaaagactaaggcggagctgtgtgctaatttgaaagacgccaaaatgatcgaggtagagaaatctgcaggcaaaactgtctttgttttttccggacaaggagggcagtacgtgggtatgggagcgaacttatacaaaagtacgcccgcttttcgtaggatagtggatgaatgtcatagtaagcttattagttgggggtaccctagtatcttatctgtgatcaggccatcaggtgacgcggattcagcaagcgctgatagcttcgaggtctttcaatccgcagttttcgtattggaatatgcactagcaagcctttggatgtcctggggcgttagacccgatgccgtcgcaggacactccctgggtgagtatgcagctctagtcacggcgaacgttatcaccatagacgatgccttgaaattagtcgccgagagagctaggttgatgagtcaaaaatgtgcgccaaaaatcactggaatgctagcggtaagggtgtctccctctaagatgactgagattctaaaatccgccaactatcaatccctatccattgcctgttacaactcaactgctgattgtgtcctaggaggcaatttggatgagctaaaattacttcaaggtgagctaaagcaggcggggaataaaactatacttcttaacgtcccctacgggtaccatacgagtgctatgagtcctatccttcaggacttatgtcaattaggtaaccaagtaaagatttctgcgccaacaattccaatagtcagcaacgtgtatggcgtagtagtagcgccgggtgatcattcaaagtttaccccagattatttctccagacattgtggagagccggtccagttcgagcagggagtgacctctttgatggggatcgaagagttcgccaaggtgagcgcatggatagagatcggaccgcatcccacgactttacccatgttgagatctataccactggcaagccaaaacaccttacatttgcccagtctacgtaaagatatcctagattgggagaccttatgtggtactttgtcatccttatattgcgcacaaacaagcctatcatggcgttccgtattcacggacctggcacaaacggcacgtcttgttgatctgcctagttacccgttcgccgatacgagattctgggtccaatatgaagacgaaaggccaactcagagcctagacgctccggtaacaaaagcagccgccccaccacgttttagtctattgggaacatgcatctctgtgcccccgccagatgtggaggaagcggctgtgttcgaaacacccatcgagatccttagtcatttgattgaaggacatctggtggccggcttcgctttgtgtcccgcctctgtatatcatgagttagcgttgggagcagctcatatcttgctagagaaaactgggaagctagaccccgatgtggtgcttgatttgagcgagatcgtatacgcgaatccccttgtgtactcatctgaggttcgtaggacgataagagtcgaggttacaccctatgaacgtgacgaaaaacacaccgggaagttcaccatagggtcttgggtggacactccttccgataaccaggctcattgctcagggttcttcgtaaaacgtagtgcaacatacgcaagttctaagttggcattatccaagacgatgattgagagacgtattcaaccgatgcaaaacggctctcctgcctcagagacttttttcactcagacggcttataatgttatcttttccagagtggtacaatacagcaaagcctaccatacgatgaagtctgttacgatagacccaaacggcgttgatgctttcgccgttgtcaaattaccgcctgaagcaagcagcggtcaatttgtagttcaccctattttcatggacacgttgttacacgtagccggattcgttataaattgcaatgcgggccaaaatgaagcattcatatgttctcaggtagataaggcgaaggcgattcctgaactaattaatccatccacaacgtacggcgtgtattgcaatattgggtttctaagcgagacccttgccgtggcggacgcatacgcgatcgagttagacgggactgcgggaaatgtcgtggcgcatatgaagagaatgcgttttagaaagctaagaatgccaggcttcaaatccctattagctcgtgtggcaaggggcagtagccaaactcatgctgcaccggctattagccagcccggtaacagagtccctgctgccacacagggatgggaggataagctgatcggtctaatagctgagacatgcgacgtgaatgtcgcggacatcaaacttcaaagtaggctatctgatcttggtatcgattctctaatgtccatagaattagctgggcgtatacaagctcttttgcctagttgcgacatcgatgccaacgccgtcgcttcctttaaccgtgtgggagatttagtcttagagttaaaggataagtgcggtagttctacgagtgcctcaagtgacaccttacatgactccgacatagtttctcccccgcctactcaggtctctagccctcgtacccctgactccttacttaagattaaagaaataatgtcttctattttaggggttgccatgagggatttaagcgaggaccaagaccttgagcgtctgggtctagactcacttacgagcattgaggcaagacacgcccttcagtcaagccttaatgttaatcttgcagaagatgttttcatgatatgcaaaaccatccgtgacatagatacggccgtttcagccatgttgtcacccccttctgacgttccgaaagtccaccccaagcataccgaacaatcagaaaagccagcgctactggggactgaaattaatccagtccgtcttcaggaaggttccagcgcaggcacactgcctttgttcttgatccatgacggctctgggatggcgcacccatacgccaggctgtccccacttggtagaccgctgtgggggatacacaacccgaagttacctaccggagacgcgtgggacggaggagtgctagagatggcttctcattatgtcgaattgataaaagcagcttctggtactacaggttgtatagtgggaggctggagtttcggcggcgtgcttgcctttgaagtagctagacagctgattaggtcaggaatacgtgtccctggtatcgtattgatagattcacctcaccctttgaccaaaagccctcttcccgatagtcttattgaaaacgtgataggcgggaagggttccacgaacaaattaacagagctggtgagagctcagatgagacacgctactagggcattgataagttatgatctatctcagtctccggccagcggcgtgttaccacccaaagccgttatgctgcgtagccaagaggcgttttccttgccctcagttgaaacagagagtgccgccttcttagccgaaagaggtgatcccgcttccagcgttgcgcaatgggagaaagtactgggggtaagtgtaccagtgattgatatcccaggaaaccatttcgagccattcgagcctcgttacgtgggggtagtgtccgaaaagctgaaggaggctgtggcgatgttggactaactcgagcatgcatctagagggccgcatcatgtaattagttatgtcacgcttacattcacgccctccccccacatccgctctaaccgaaaaggaaggagttagacaacctgaagtctaggtccctatttatttttttatagttatgttagtattaagaacgttatttatatttcaaatttttcttttttttctgtacagacgcgtgtacgcatgtaacattatactgaaaaccttgcttgagaaggttttgggacgctcgaaggctttaatttgcgaattacaatagtatgtctgatgtctgcaagaagtaacaggcgtgtgcacaagaatacgtgtgtgtgcgtaagcgtatgcactggtggcataacttatctaagaagtatatatcactgacatagaaatgtagatatacaggtatttttctcgataatcgataaaaatctcgtcgcgctgaaccaaacttggtggttacggagagtttttctctcatcattactgtctttcgcattgatttcccctttgaccgataaaatcccttggattcataagattaaacaaagaggtgatcaaagagaaccctgtgaaagtttatgtttataaccgggcataaagtgaactagacactttcaagaagccaaccaaagcatgagtaacgaagcttaccagcatgatcataccgtaaatcctcaccag

SEQ ID NO: 100 - DNA, 6703 bp, Artificial Sequence
  PT161
aagagtaaaaaattgtacttggcggataatgcctttagcggcttaactgtgccctccatggaaaaatcagtcaagatatccacatgtgtttttagtaaacaaattttgggacctaatgcttcaactaactccagtaattccttggtggtacgaacatccaatgaagcacacaagtttgtttgcttttcgtgcatgatattaaatagcttggcagcaacaggactaggatgagtagcagcacgttccttatatgtagctttcgacatgatttatcttcgtttcctgcaggtttttgttctgtgcagttgggttaagaatactgggcaatttcatgtttcttcaacactacatatgcgtatatataccaatctaagtctgtgctccttccttcgttcttccttctgttcggagattaccgaatcaaaaaaatttcaaagaaaccgaaatcaaaaaaaagaataaaaaaaaaatgatgaattgaattgaaaagctagcttatcgatgataagctgtcaaagatgagaattaattccacggactatagactatactagatactccgtctactgtacgatacacttccgctcaggtccttgtcctttaacgaggccttaccactcttttgttactctattgatccagctcagcaaaggcagtgtgatctaagattctatcttcgcgatgtagtaaaactagctagaccgagaaagagactagaaatgcaaaaggcacttctacaatggctgccatcattattatccgatgtgacgctgcagcttctcaatgatattcgaatacgctttgaggagatacagcctaatatccgacaaactgttttacagatttacgatcgtacttgttacccatcattgaattttgaacatccgaacctgggagttttccctgaaacagatagtatatttgaacctgtataataatatatagtctagcgctttacggaagacaatgtatgtatttcggttcctggagaaactattgcatctattgcataggtaatcttgcacgtcgcatccccggttcattttctgcgtttccatcttgcacttcaatagcatatctttgttaacgaagcatctgtgcttcattttgtagaacaaaaatgcaacgcgagagcgctaatttttcaaacaaagaatctgagctgcatttttacagaacagaaatgcaacgcgaaagcgctattttaccaacgaagaatctgtgcttcatttttgtaaaacaaaaatgcaacgcgacgagagcgctaatttttcaaacaaagaatctgagctgcatttttacagaacagaaatgcaacgcgagagcgctattttaccaacaaagaatctatacttcttttttgttctacaaaaatgcatcccgagagcgctatttttctaacaaagcatcttagattactttttttctcctttgtgcgctctataatgcagtctcttgataactttttgcactgtaggtccgttaaggttagaagaaggctactttggtgtctattttctcttccataaaaaaagcctgactccacttcccgcgtttactgattactagcgaagctgcgggtgcattttttcaagataaaggcatccccgattatattctataccgatgtggattgcgcatactttgtgaacagaaagtgatagcgttgatgattcttcattggtcagaaaattatgaacggtttcttctattttgtctctatatactacgtataggaaatgtttacattttcgtattgttttcgattcactctatgaatagttcttactacaatttttttgtctaaagagtaatactagagataaacataaaaaatgtagaggtcgagtttagatgcaagttcaaggagcgaaaggtggatgggtaggttatatagggatatagcacagagatatatagcaaagagatacttttgagcaatgtttgtggaagcggtattcgcaatgggaagctccaccccggttgataatcagaaaagccccaaaaacaggaagattgtataagcaaatatttaaattgtaaacgttaatattttgttaaaattcgcgttaaatttttgttaaatcagctcattttttaacgaatagcccgaaatcggcaaaatcccttataaatcaaaagaatagaccgagatagggttgagtgttgttccagtttccaacaagagtccactattaaagaacgtggactccaacgtcaaagggcgaaaaagggtctatcagggcgatggcccactacgtgaaccatcaccctaatcaagttttttggggtcgaggtgccgtaaagcagtaaatcggaagggtaaacggatgcccccatttagagcttgacggggaaagccggcgaacgtggcgagaaaggaagggaagaaagcgaaaggagcgggggctagggcggtgggaagtgtaggggtcacgctgggcgtaaccaccacacccgccgcgcttaatggggcgctacagggcgcgtggggatgatccactagtacggattagaagccgccgagcgggtgacagccctccgaaggaagactctcctccgtgcgtcctcgtcttcaccggtcgcgttcctgaaacgcagatgtgcctcgcgccgcactgctccgaacaataaagattctacaatactagcttttatggttatgaagaggaaaaattggcagtaacctggccccacaaaccttcaaatgaacgaatcaaattaacaaccataggatgataatgcgattagttttttagccttatttctggggtaattaatcagcgaagcgatgatttttgatctattaacagatatataaatgcaaaaactgcataaccactttaactaatactttcaacattttcggtttgtattacttcttattcaaatgtaataaaagtatcaacaaaaaattgttaatatacctctatactttaacgtcaaggagaaaaaaccccggatcggactactagcagctgtaatacgactcactatagggaatattaagcttaaacaatgtctggcgcagcagaggtcgaaagagtgtattccgccatggaggagtcagcgggtttattagatgtggcctgttccagggaaaaaatccaacctatccttactgccttccaagacgtattggctgacggggttattgtattctcaatggccaatggccgtcacgctactgagctagacttttctatttcagtaccagcagggcacggagacccatatgcagcagcactagaacatgggctgataccggctactggtcacccagttggggatttgcttgccgatacgcaaaaagctttgcccgtaagcatgtttgcagtggatggcgaagtaacttcaggctttaagaaaacgtatgccttttttccgacggacgacatgcctgggttagcacaattgattgatattccctctatgccgccatcagtcgccgaaaatgcggaacttttcggcagatatggccttgataaggtgcagatgatctccttagattataaaaaaaatcaagtgaatttgtacttttccaatctgaatcccgagttcctacagccagagccagttcaagccatggtacgtgaaatggggctacaattgcctgctgataagggcctggcgttcgcaaagagaagttttgcagtctatcctacactttcttgggattctgccaaaatcgaaagactgtgctttgcggtgatctctacagatccaacgctggcaccggcccaggaacaggcagatttagacttattcagcacttatgctaataacgcaccgtatgcatacgcaggtgaaaagcgtactttggtgtatggccttacgctttccccctccgaagaatattataagctagggtcttactatcagatttccgacatccaacgtaaattgttaaaggctttcgatgctttgactgattgactcgagcatgcatctagagggccgcatcatgtaattagttatgtcacgcttacattcacgccctccccccacatccgctctaaccgaaaaggaaggagttagacaacctgaagtctaggtccctatttatttttttatagttatgttagtattaagaacgttatttatatttcaaatttttcttttttttctgtacagacgcgtgtacgcatgtaacattatactgaaaaccttgcttgagaaggttttgggacgctcgaaggctttaatttgcggccctgcattaatgaatcggccaacgcgcggggagaggcggtttgcgtattgggcgctcttccgcttcctcgctcactgactcgctgcgctcggtcgttcggctgcggcgagcggtatcagctcactcaaaggcggtaatacggttatccacagaatcaggggataacgcaggaaagaacatgtgagcaaaaggccagcaaaagcccaggaaccgtaaaaaggccgcgttgctggcgtttttccataggctccgcccccctgacgagcatcacaaaaatcgacgctcaagtcagaggtggcgaaacccgacaggactataaagataccaggcgtttccccctggaagctccctcgtgcgctctcctgttccgaccctgccgcttaccggatacctgtccgcctttctcccttcgggaagcgtggcgctttctcatagctcacgctgtaggtatctcagttcggtgtaggtcgttcgctccaagctgggctgtgtgcacgaaccccccgttcagcccgaccgctgcgccttatccggtaactatcgtcttgagtccaacccggtaagacacgacttatcgccactggcagcagccactggtaacaggattagcagagcgaggtatgtaggcggtgctacagagttcttgaagtggtggcctaactacggctacactagaaggacagtatttggtatctgcgctctgctgaagccagttaccttcggaaaaagagttggtagctcttgatccggcaaacaaaccaccgctggtagcggtggtttttttgtttgcaagcagcagattacgcgcagaaaaaaaggatctcaagaagatcctttgatcttttctacggggtctgacgctcagtggaacgaaaactcacgttaagggattttggtcatgagattatcaaaaaggatcttcacctagatccttttaaattaaaaatgaagttttaaatcaatctaaagtatatatgagtaaacttggtctgacagttaccaatgcttaatcagtgaggcacctatctcagcgatctgtctatttcgttcatccatagttgcctgactccccgtcgtgtagataactacgatacgggagcgcttaccatctggccccagtgctgcaatgataccgcgagacccacgctcaccggctccagatttatcagcaataaaccagccagccggaagggccgagcgcagaagtggtcctgcaactttatccgcctccattcagtctattaattgttgccgggaagctagagtaagtagttcgccagttaatagtttgcgcaacgttgttggcattgctacaggcatcgtggtgtcactctcgtcgtttggtatggcttcattcagctccggttcccaacgatcaaggcgagttacatgatcccccatgttgtgcaaaaaagcggttagctccttcggtcctccgatcgttgtcagaagtaagttggccgcagtgttatcactcatggttatggcagcactgcataattctcttactgtcatgccatccgtaagatgcttttctgtgactggtgagtactcaaccaagtcattctgagaatagtgtatgcggcgaccgagttgctcttgcccggcgtcaatacgggataatagtgtatcacatagcagaactttaaaagtgctcatcattggaaaacgttcttcggggcgaaaactctcaaggatcttaccgctgttgagatccagttcgatgtaacccactcgtgcacccaactgatcttcagcatcttttactttcaccagcgtttctgggtgagcaaaaacaggaaggcaaaatgccgcaaaaaagggaataagggcgacacggaaatgttgaatactcatactcttcctttttcaatgggtaataactgatataattaaattgaagctctaatttgtgagtttagtatacatgcatttacttataatacagttttttagttttgctggccgcatcttctcaaatatgcttcccagcctgcttttctgtaacgttcaccctctaccttagcatcccttccctttgcaaatagtcctcttccaacaataataatgtcagatcctgtagagaccacatcatccacggttctatactgttgacccaatgcgtctcccttgtcatctaaacccacaccgggtgtcataatcaaccaatcgtaaccttcatctcttccacccatgtctctttgagcaataaagccgataacaaaatctttgtcgctcttcgcaatgtcaacagtacccttagtatattctccagtagatagggagcccttgcatgacaattctgctaacatcaaaaggcctctaggttcctttgttacttcttctgccgcctgcttcaaaccgctaacaatacctgggcccaccacaccgtgtgcattcgtaatgtctgcccattctgctattctgtatacacccgcagagtactgcaatttgactgtattaccaatgtcagcaaattttctgtcttcg

SEQ ID NO: 101 - DNA, 3564 bp, Artificial Sequence; identical to SEQ ID NO: 2
  NpgA

SEQ ID NO: 102 - DNA, 7114 bp, Artificial Sequence; identical to SEQ ID NO: 8
  PDH

SEQ ID NO: 103 - DNA, 3256 bp, Artificial Sequence; identical to SEQ ID NO: 9
  Maf1

SEQ ID NO: 104 - DNA, 4254 bp, Artificial Sequence; identical to SEQ ID NO: 10
  Erg20K197E

SEQ ID NO: 105 - DNA, 4843 bp, Artificial Sequence; identical to SEQ ID NO: 12
  tHMGr-IDI

SEQ ID NO: 106 - DNA, 7673 bp, Artificial Sequence; identical to SEQ ID NO: 13
  PGK1p:ACC(1S659A,S1157A)

SEQ ID NO: 107 - DNA, 8980 bp, Artificial Sequence; identical to SEQ ID NO: 18
  PLAS36

SEQ ID NO: 108 - DNA, 6775 bp, Artificial Sequence
  PLAS414
tccagtaattccttggtggtacgaacatccaatgaagcacacaagtttgtttgcttttcgtgcatgatattaaatagcttggcagcaacaggactaggatgagtagcagcacgttccttatatgtagctttcgacatgatttatcttcgtttcctgcaggtttttgttctgtgcagttgggttaagaatactgggcaatttcatgtttcttcaacactacatatgcgtatatataccaatctaagtctgtgctccttccttcgttcttccttctgttcggagattaccgaatcaaaaaaatttcaaagaaaccgaaatcaaaaaaaagaataaaaaaaaaatgatgaattgaattgaaaagctagcttatcgatgataagctgtcaaagatgagaattaattccacggactatagactatactagatactccgtctactgtacgatacacttccgctcaggtccttgtcctttaacgaggccttaccactcttttgttactctattgatccagctcagcaaaggcagtgtgatctaagattctatcttcgcgatgtagtaaaactagctagaccgagaaagagactagaaatgcaaaaggcacttctacaatggctgccatcattattatccgatgtgacgctgcagcttctcaatgatattcgaatacgctttgaggagatacagcctaatatccgacaaactgttttacagatttacgatcgtacttgttacccatcattgaattttgaacatccgaacctgggagttttccctgaaacagatagtatatttgaacctgtataataatatatagtctagcgctttacggaagacaatgtatgtatttcggttcctggagaaactattgcatctattgcataggtaatcttgcacgtcgcatccccggttcattttctgcgtttccatcttgcacttcaatagcatatctttgttaacgaagcatctgtgcttcattttgtagaacaaaaatgcaacgcgagagcgctaatttttcaaacaaagaatctgagctgcatttttacagaacagaaatgcaacgcgaaagcgctattttaccaacgaagaatctgtgcttcatttttgtaaaacaaaaatgcaacgcgacgagagcgctaatttttcaaacaaagaatctgagctgcatttttacagaacagaaatgcaacgcgagagcgctattttaccaacaaagaatctatacttcttttttgttctacaaaaatgcatcccgagagcgctatttttctaacaaagcatcttagattactttttttctcctttgtgcgctctataatgcagtctcttgataactttttgcactgtaggtccgttaaggttagaagaaggctactttggtgtctattttctcttccataaaaaaagcctgactccacttcccgcgtttactgattactagcgaagctgcgggtgcattttttcaagataaaggcatccccgattatattctataccgatgtggattgcgcatactttgtgaacagaaagtgatagcgttgatgattcttcattggtcagaaaattatgaacggtttcttctattttgtctctatatactacgtataggaaatgtttacattttcgtattgttttcgattcactctatgaatagttcttactacaatttttttgtctaaagagtaatactagagataaacataaaaaatgtagaggtcgagtttagatgcaagttcaaggagcgaaaggtggatgggtaggttatatagggatatagcacagagatatatagcaaagagatacttttgagcaatgtttgtggaagcggtattcgcaatgggaagctccaccccggttgataatcagaaaagccccaaaaacaggaagattgtataagcaaatatttaaattgtaaacgttaatattttgttaaaattcgcgttaaatttttgttaaatcagctcattttttaacgaatagcccgaaatcggcaaaatcccttataaatcaaaagaatagaccgagatagggttgagtgttgttccagtttccaacaagagtccactattaaagaacgtggactccaacgtcaaagggcgaaaaagggtctatcagggcgatggcccactacgtgaaccatcaccctaatcaagttttttggggtcgaggtgccgtaaagcagtaaatcggaagggtaaacggatgcccccatttagagcttgacggggaaagccggcgaacgtggcgagaaaggaagggaagaaagcgaaaggagcgggggctagggcggtgggaagtgtaggggtcacgctgggcgtaaccaccacacccgccgcgcttaatggggcgctacagggcgcgtggggatgatccactagtacggattagaagccgccgagcgggtgacagccctccgaaggaagactctcctccgtgcgtcctcgtcttcaccggtcgcgttcctgaaacgcagatgtgcctcgcgccgcactgctccgaacaataaagattctacaatactagcttttatggttatgaagaggaaaaattggcagtaacctggccccacaaaccttcaaatgaacgaatcaaattaacaaccataggatgataatgcgattagttttttagccttatttctggggtaattaatcagcgaagcgatgatttttgatctattaacagatatataaatgcaaaaactgcataaccactttaactaatactttcaacattttcggtttgtattacttcttattcaaatgtaataaaagtatcaacaaaaaattgttaatatacctctatactttaacgtcaaggagaaaaaaccccggatcggactactagcagctgtaatacgactcactatagggaatattaagcttaaacaatgagcgcaaaagtgagtcctatggcgtatacgaatccgagatatgaaacgggcccattatcactaattccaaagcccattgttccttattttgagctaatgagattcgaattgccccatgggtattatttaggatatttccctcatcttgtgggtattatgtacggggcgagcgctggtccggagaggctaccggctagggacttagtgtttcaggcgttactgtatgttggttggacttttgcgatgaggggtgccggttgcgcttggaatgataatatcgaccaagatttcgatcgtaagacggaaagatgtagaacgcgtcctattgcaagaggagcggtttctaccacggcgggccacgtcttcgctgtcgccggtgttgctctagctttcttgtgtttgtctccacttccaaccgaatgtcaccaattaggggttttagtcaccgtattgtctgtgatctatcccttttgcaaaagatttactaattttgctcaggtaatacttggaatgactttagctgcaaatttcatcttagccgcttatggcgccggcctacccgcgttagaacagccatataccaggccgacaatgtccgccacgctagctatcacattactagtggtcttttatgacgtggtttatgcgcgtcaggatacagcagatgatcttaaatcaggcgtgaagggaatggccgttttattccgtaatcatattgaagttttattggccgttctaacttgtaccataggtggcttattagcggctaccggggtttcagttggaaatgggccctattacttcttgttctcggtggccggattaacggtggctctgttagctatgatcggaggtataagatacagaatttttcatacatggaatggttattccgggtggttttatgtgttggctatcattaacctaatgtcaggatattttattgagtaccttgataacgctccaattcttgcaagggggagctaactcgagcatgcatctagagggccgcatcatgtaattagttatgtcacgcttacattcacgccctccccccacatccgctctaaccgaaaaggaaggagttagacaacctgaagtctaggtccctatttatttttttatagttatgttagtattaagaacgttatttatatttcaaatttttcttttttttctgtacagacgcgtgtacgcatgtaacattatactgaaaaccttgcttgagaaggttttgggacgctcgaaggctttaatttgcggccctgcattaatgaatcggccaacgcgcggggagaggcggtttgcgtattgggcgctcttccgcttcctcgctcactgactcgctgcgctcggtcgttcggctgcggcgagcggtatcagctcactcaaaggcggtaatacggttatccacagaatcaggggataacgcaggaaagaacatgtgagcaaaaggccagcaaaagcccaggaaccgtaaaaaggccgcgttgctggcgtttttccataggctccgcccccctgacgagcatcacaaaaatcgacgctcaagtcagaggtggcgaaacccgacaggactataaagataccaggcgtttccccctggaagctccctcgtgcgctctcctgttccgaccctgccgcttaccggatacctgtccgcctttctcccttcgggaagcgtggcgctttctcatagctcacgctgtaggtatctcagttcggtgtaggtcgttcgctccaagctgggctgtgtgcacgaaccccccgttcagcccgaccgctgcgccttatccggtaactatcgtcttgagtccaacccggtaagacacgacttatcgccactggcagcagccactggtaacaggattagcagagcgaggtatgtaggcggtgctacagagttcttgaagtggtggcctaactacggctacactagaaggacagtatttggtatctgcgctctgctgaagccagttaccttcggaaaaagagttggtagctcttgatccggcaaacaaaccaccgctggtagcggtggtttttttgtttgcaagcagcagattacgcgcagaaaaaaaggatctcaagaagatcctttgatcttttctacggggtctgacgctcagtggaacgaaaactcacgttaagggattttggtcatgagattatcaaaaaggatcttcacctagatccttttaaattaaaaatgaagttttaaatcaatctaaagtatatatgagtaaacttggtctgacagttaccaatgcttaatcagtgaggcacctatctcagcgatctgtctatttcgttcatccatagttgcctgactccccgtcgtgtagataactacgatacgggagcgcttaccatctggccccagtgctgcaatgataccgcgagacccacgctcaccggctccagatttatcagcaataaaccagccagccggaagggccgagcgcagaagtggtcctgcaactttatccgcctccattcagtctattaattgttgccgggaagctagagtaagtagttcgccagttaatagtttgcgcaacgttgttggcattgctacaggcatcgtggtgtcactctcgtcgtttggtatggcttcattcagctccggttcccaacgatcaaggcgagttacatgatcccccatgttgtgcaaaaaagcggttagctccttcggtcctccgatcgttgtcagaagtaagttggccgcagtgttatcactcatggttatggcagcactgcataattctcttactgtcatgccatccgtaagatgcttttctgtgactggtgagtactcaaccaagtcattctgagaatagtgtatgcggcgaccgagttgctcttgcccggcgtcaatacgggataatagtgtatcacatagcagaactttaaaagtgctcatcattggaaaacgttcttcggggcgaaaactctcaaggatcttaccgctgttgagatccagttcgatgtaacccactcgtgcacccaactgatcttcagcatcttttactttcaccagcgtttctgggtgagcaaaaacaggaaggcaaaatgccgcaaaaaagggaataagggcgacacggaaatgttgaatactcatactcttcctttttcaatgggtaataactgatataattaaattgaagctctaatttgtgagtttagtatacatgcatttacttataatacagttttttagttttgctggccgcatcttctcaaatatgcttcccagcctgcttttctgtaacgttcaccctctaccttagcatcccttccctttgcaaatagtcctcttccaacaataataatgtcagatcctgtagagaccacatcatccacggttctatactgttgacccaatgcgtctcccttgtcatctaaacccacaccgggtgtcataatcaaccaatcgtaaccttcatctcttccacccatgtctctttgagcaataaagccgataacaaaatctttgtcgctcttcgcaatgtcaacagtacccttagtatattctccagtagatagggagcccttgcatgacaattctgctaacatcaaaaggcctctaggttcctttgttacttcttctgccgcctgcttcaaaccgctaacaatacctgggcccaccacaccgtgtgcattcgtaatgtctgcccattctgctattctgtatacacccgcagagtactgcaatttgactgtattaccaatgtcagcaaattttctgtcttcgaagagtaaaaaattgtacttggcggataatgcctttagcggcttaactgtgccctccatggaaaaatcagtcaagatatccacatgtgtttttagtaaacaaattttgggacctaatgcttcaactaac

SEQ ID NO: 109 - DNA, 6841 bp, Artificial Sequence; identical to SEQ ID NO: 17
  PLAS250

SEQ ID NO: 110 - protein, 305 aa, Artificial Sequence; identical to SEQ ID NO: 82
  PT161

SEQ ID NO: 111 - DNA, 915 bp, Artificial Sequence; identical to SEQ ID NO: 56
  PT245

SEQ ID NO: 112 - DNA, 6841 bp, Artificial Sequence; identical to SEQ ID NO: 17
  PLAS250

SEQ ID NO: 113 - protein, 302 aa, Artificial Sequence; identical to SEQ ID NO: 91
  PT214

SEQ ID NO: 114 - DNA, 6484 bp, Artificial Sequence
  PLAS400
tccagtaattccttggtggtacgaacatccaatgaagcacacaagtttgtttgcttttcgtgcatgatattaaatagcttggcagcaacaggactaggatgagtagcagcacgttccttatatgtagctttcgacatgatttatcttcgtttcctgcaggtttttgttctgtgcagttgggttaagaatactgggcaatttcatgtttcttcaacactacatatgcgtatatataccaatctaagtctgtgctccttccttcgttcttccttctgttcggagattaccgaatcaaaaaaatttcaaagaaaccgaaatcaaaaaaaagaataaaaaaaaaatgatgaattgaattgaaaagctagcttatcgatgataagctgtcaaagatgagaattaattccacggactatagactatactagatactccgtctactgtacgatacacttccgctcaggtccttgtcctttaacgaggccttaccactcttttgttactctattgatccagctcagcaaaggcagtgtgatctaagattctatcttcgcgatgtagtaaaactagctagaccgagaaagagactagaaatgcaaaaggcacttctacaatggctgccatcattattatccgatgtgacgctgcagcttctcaatgatattcgaatacgctttgaggagatacagcctaatatccgacaaactgttttacagatttacgatcgtacttgttacccatcattgaattttgaacatccgaacctgggagttttccctgaaacagatagtatatttgaacctgtataataatatatagtctagcgctttacggaagacaatgtatgtatttcggttcctggagaaactattgcatctattgcataggtaatcttgcacgtcgcatccccggttcattttctgcgtttccatcttgcacttcaatagcatatctttgttaacgaagcatctgtgcttcattttgtagaacaaaaatgcaacgcgagagcgctaatttttcaaacaaagaatctgagctgcatttttacagaacagaaatgcaacgcgaaagcgctattttaccaacgaagaatctgtgcttcatttttgtaaaacaaaaatgcaacgcgacgagagcgctaatttttcaaacaaagaatctgagctgcatttttacagaacagaaatgcaacgcgagagcgctattttaccaacaaagaatctatacttcttttttgttctacaaaaatgcatcccgagagcgctatttttctaacaaagcatcttagattactttttttctcctttgtgcgctctataatgcagtctcttgataactttttgcactgtaggtccgttaaggttagaagaaggctactttggtgtctattttctcttccataaaaaaagcctgactccacttcccgcgtttactgattactagcgaagctgcgggtgcattttttcaagataaaggcatccccgattatattctataccgatgtggattgcgcatactttgtgaacagaaagtgatagcgttgatgattcttcattggtcagaaaattatgaacggtttcttctattttgtctctatatactacgtataggaaatgtttacattttcgtattgttttcgattcactctatgaatagttcttactacaatttttttgtctaaagagtaatactagagataaacataaaaaatgtagaggtcgagtttagatgcaagttcaaggagcgaaaggtggatgggtaggttatatagggatatagcacagagatatatagcaaagagatacttttgagcaatgtttgtggaagcggtattcgcaatgggaagctccaccccggttgataatcagaaaagccccaaaaacaggaagattgtataagcaaatatttaaattgtaaacgttaatattttgttaaaattcgcgttaaatttttgttaaatcagctcattttttaacgaatagcccgaaatcggcaaaatcccttataaatcaaaagaatagaccgagatagggttgagtgttgttccagtttccaacaagagtccactattaaagaacgtggactccaacgtcaaagggcgaaaaagggtctatcagggcgatggcccactacgtgaaccatcaccctaatcaagttttttggggtcgaggtgccgtaaagcagtaaatcggaagggtaaacggatgcccccatttagagcttgacggggaaagccggcgaacgtggcgagaaaggaagggaagaaagcgaaaggagcgggggctagggcggtgggaagtgtaggggtcacgctgggcgtaaccaccacacccgccgcgcttaatggggcgctacagggcgcgtggggatgatccactagtacggattagaagccgccgagcgggtgacagccctccgaaggaagactctcctccgtgcgtcctcgtcttcaccggtcgcgttcctgaaacgcagatgtgcctcgcgccgcactgctccgaacaataaagattctacaatactagcttttatggttatgaagaggaaaaattggcagtaacctggccccacaaaccttcaaatgaacgaatcaaattaacaaccataggatgataatgcgattagttttttagccttatttctggggtaattaatcagcgaagcgatgatttttgatctattaacagatatataaatgcaaaaactgcataaccactttaactaatactttcaacattttcggtttgtattacttcttattcaaatgtaataaaagtatcaacaaaaaattgttaatatacctctatactttaacgtcaaggagaaaaaaccccggatcggactactagcagctgtaatacgactcactatagggaatattaagcttaaacaatggtgtctaaaggtgaagccgtcatcaaagaattcatgagattcaaggttcacatggaaggttctatgaatggtcacgaattcgaaattgaaggtgaaggtgagggtagaccatatgaaggtactcaaactgctaagttgaaggttacaaaaggtggtccattgccattctcttgggatattttgtctccacaattcatgtacggttctagagcttttacaaaacacccagctgatatcccagattactacaagcaatcatttccagagggtttcaagtgggaaagagttatgaattttgaagatggtggtgccgttactgttactcaagatacttctttggaagatggcaccttgatctacaaggttaagttgagaggtactaatttcccaccagatggtccagttatgcaaaaaaagactatgggttgggaagctagtactgaaagattatatccagaggatggtgttttgaagggtgatattaagatggccttgagattgaaagacggtggtagatatttggctgatttcaagactacttacaaggccaaaaagccagttcaaatgccaggtgcttataacgttgatagaaagttggatatcacctctcacaacgaagattacaccgttgttgaacagtacgaaagatctgaaggtagacattctactggtggtatggatgagttgtacaagtaactcgagcatgcatctagagggccgcatcatgtaattagttatgtcacgcttacattcacgccctccccccacatccgctctaaccgaaaaggaaggagttagacaacctgaagtctaggtccctatttatttttttatagttatgttagtattaagaacgttatttatatttcaaatttttcttttttttctgtacagacgcgtgtacgcatgtaacattatactgaaaaccttgcttgagaaggttttgggacgctcgaaggctttaatttgcggccctgcattaatgaatcggccaacgcgcggggagaggcggtttgcgtattgggcgctcttccgcttcctcgctcactgactcgctgcgctcggtcgttcggctgcggcgagcggtatcagctcactcaaaggcggtaatacggttatccacagaatcaggggataacgcaggaaagaacatgtgagcaaaaggccagcaaaagcccaggaaccgtaaaaaggccgcgttgctggcgtttttccataggctccgcccccctgacgagcatcacaaaaatcgacgctcaagtcagaggtggcgaaacccgacaggactataaagataccaggcgtttccccctggaagctccctcgtgcgctctcctgttccgaccctgccgcttaccggatacctgtccgcctttctcccttcgggaagcgtggcgctttctcatagctcacgctgtaggtatctcagttcggtgtaggtcgttcgctccaagctgggctgtgtgcacgaaccccccgttcagcccgaccgctgcgccttatccggtaactatcgtcttgagtccaacccggtaagacacgacttatcgccactggcagcagccactggtaacaggattagcagagcgaggtatgtaggcggtgctacagagttcttgaagtggtggcctaactacggctacactagaaggacagtatttggtatctgcgctctgctgaagccagttaccttcggaaaaagagttggtagctcttgatccggcaaacaaaccaccgctggtagcggtggtttttttgtttgcaagcagcagattacgcgcagaaaaaaaggatctcaagaagatcctttgatcttttctacggggtctgacgctcagtggaacgaaaactcacgttaagggattttggtcatgagattatcaaaaaggatcttcacctagatccttttaaattaaaaatgaagttttaaatcaatctaaagtatatatgagtaaacttggtctgacagttaccaatgcttaatcagtgaggcacctatctcagcgatctgtctatttcgttcatccatagttgcctgactccccgtcgtgtagataactacgatacgggagcgcttaccatctggccccagtgctgcaatgataccgcgagacccacgctcaccggctccagatttatcagcaataaaccagccagccggaagggccgagcgcagaagtggtcctgcaactttatccgcctccattcagtctattaattgttgccgggaagctagagtaagtagttcgccagttaatagtttgcgcaacgttgttggcattgctacaggcatcgtggtgtcactctcgtcgtttggtatggcttcattcagctccggttcccaacgatcaaggcgagttacatgatcccccatgttgtgcaaaaaagcggttagctccttcggtcctccgatcgttgtcagaagtaagttggccgcagtgttatcactcatggttatggcagcactgcataattctcttactgtcatgccatccgtaagatgcttttctgtgactggtgagtactcaaccaagtcattctgagaatagtgtatgcggcgaccgagttgctcttgcccggcgtcaatacgggataatagtgtatcacatagcagaactttaaaagtgctcatcattggaaaacgttcttcggggcgaaaactctcaaggatcttaccgctgttgagatccagttcgatgtaacccactcgtgcacccaactgatcttcagcatcttttactttcaccagcgtttctgggtgagcaaaaacaggaaggcaaaatgccgcaaaaaagggaataagggcgacacggaaatgttgaatactcatactcttcctttttcaatgggtaataactgatataattaaattgaagctctaatttgtgagtttagtatacatgcatttacttataatacagttttttagttttgctggccgcatcttctcaaatatgcttcccagcctgcttttctgtaacgttcaccctctaccttagcatcccttccctttgcaaatagtcctcttccaacaataataatgtcagatcctgtagagaccacatcatccacggttctatactgttgacccaatgcgtctcccttgtcatctaaacccacaccgggtgtcataatcaaccaatcgtaaccttcatctcttccacccatgtctctttgagcaataaagccgataacaaaatctttgtcgctcttcgcaatgtcaacagtacccttagtatattctccagtagatagggagcccttgcatgacaattctgctaacatcaaaaggcctctaggttcctttgttacttcttctgccgcctgcttcaaaccgctaacaatacctgggcccaccacaccgtgtgcattcgtaatgtctgcccattctgctattctgtatacacccgcagagtactgcaatttgactgtattaccaatgtcagcaaattttctgtcttcgaagagtaaaaaattgtacttggcggataatgcctttagcggcttaactgtgccctccatggaaaaatcagtcaagatatccacatgtgtttttagtaaacaaattttgggacctaatgcttcaactaac

SEQ ID NO: 115 - DNA, 6787 bp, Artificial Sequence
  PLAS411
tccagtaattccttggtggtacgaacatccaatgaagcacacaagtttgtttgcttttcgtgcatgatattaaatagcttggcagcaacaggactaggatgagtagcagcacgttccttatatgtagctttcgacatgatttatcttcgtttcctgcaggtttttgttctgtgcagttgggttaagaatactgggcaatttcatgtttcttcaacactacatatgcgtatatataccaatctaagtctgtgctccttccttcgttcttccttctgttcggagattaccgaatcaaaaaaatttcaaagaaaccgaaatcaaaaaaaagaataaaaaaaaaatgatgaattgaattgaaaagctagcttatcgatgataagctgtcaaagatgagaattaattccacggactatagactatactagatactccgtctactgtacgatacacttccgctcaggtccttgtcctttaacgaggccttaccactcttttgttactctattgatccagctcagcaaaggcagtgtgatctaagattctatcttcgcgatgtagtaaaactagctagaccgagaaagagactagaaatgcaaaaggcacttctacaatggctgccatcattattatccgatgtgacgctgcagcttctcaatgatattcgaatacgctttgaggagatacagcctaatatccgacaaactgttttacagatttacgatcgtacttgttacccatcattgaattttgaacatccgaacctgggagttttccctgaaacagatagtatatttgaacctgtataataatatatagtctagcgctttacggaagacaatgtatgtatttcggttcctggagaaactattgcatctattgcataggtaatcttgcacgtcgcatccccggttcattttctgcgtttccatcttgcacttcaatagcatatctttgttaacgaagcatctgtgcttcattttgtagaacaaaaatgcaacgcgagagcgctaatttttcaaacaaagaatctgagctgcatttttacagaacagaaatgcaacgcgaaagcgctattttaccaacgaagaatctgtgcttcatttttgtaaaacaaaaatgcaacgcgacgagagcgctaatttttcaaacaaagaatctgagctgcatttttacagaacagaaatgcaacgcgagagcgctattttaccaacaaagaatctatacttcttttttgttctacaaaaatgcatcccgagagcgctatttttctaacaaagcatcttagattactttttttctcctttgtgcgctctataatgcagtctcttgataactttttgcactgtaggtccgttaaggttagaagaaggctactttggtgtctattttctcttccataaaaaaagcctgactccacttcccgcgtttactgattactagcgaagctgcgggtgcattttttcaagataaaggcatccccgattatattctataccgatgtggattgcgcatactttgtgaacagaaagtgatagcgttgatgattcttcattggtcagaaaattatgaacggtttcttctattttgtctctatatactacgtataggaaatgtttacattttcgtattgttttcgattcactctatgaatagttcttactacaatttttttgtctaaagagtaatactagagataaacataaaaaatgtagaggtcgagtttagatgcaagttcaaggagcgaaaggtggatgggtaggttatatagggatatagcacagagatatatagcaaagagatacttttgagcaatgtttgtggaagcggtattcgcaatgggaagctccaccccggttgataatcagaaaagccccaaaaacaggaagattgtataagcaaatatttaaattgtaaacgttaatattttgttaaaattcgcgttaaatttttgttaaatcagctcattttttaacgaatagcccgaaatcggcaaaatcccttataaatcaaaagaatagaccgagatagggttgagtgttgttccagtttccaacaagagtccactattaaagaacgtggactccaacgtcaaagggcgaaaaagggtctatcagggcgatggcccactacgtgaaccatcaccctaatcaagttttttggggtcgaggtgccgtaaagcagtaaatcggaagggtaaacggatgcccccatttagagcttgacggggaaagccggcgaacgtggcgagaaaggaagggaagaaagcgaaaggagcgggggctagggcggtgggaagtgtaggggtcacgctgggcgtaaccaccacacccgccgcgcttaatggggcgctacagggcgcgtggggatgatccactagtacggattagaagccgccgagcgggtgacagccctccgaaggaagactctcctccgtgcgtcctcgtcttcaccggtcgcgttcctgaaacgcagatgtgcctcgcgccgcactgctccgaacaataaagattctacaatactagcttttatggttatgaagaggaaaaattggcagtaacctggccccacaaaccttcaaatgaacgaatcaaattaacaaccataggatgataatgcgattagttttttagccttatttctggggtaattaatcagcgaagcgatgatttttgatctattaacagatatataaatgcaaaaactgcataaccactttaactaatactttcaacattttcggtttgtattacttcttattcaaatgtaataaaagtatcaacaaaaaattgttaatatacctctatactttaacgtcaaggagaaaaaaccccggatcggactactagcagctgtaatacgactcactatagggaatattaagcttaaacaatgccagctacgaggactcccatccaccccgaagcggcggcttacaagaacccccgttaccagtcaggtcccttaagtgtaataccaaagtcatttgttccctactgcgagttgatgaggttggaattgcctcatggtaattttcttggttacttcccgcacctagttgggctactatacggctctagcgcgtcaccagccaggttaccagctaacgaggttgcgttccaagcggttttatacattggttggacgttctttatgagaggcgcgggttgcgcgtggaacgatgtcgttgatcaagactttgatcgtaaaaccacccgttgcagagtgaggccagtcgcaagaggggcggtcagcactacaagtgcaaacatttttggtttcgcaatggtggctttggcttttgcctgtatctcaccccttccagccgagtgccaaaggcttgggttaatgaccacagttttatccattatctatcctttctgcaagagggttacaaattttgctcaggtgattttaggtatgacactggcaattaacttcatattggctgcttatggcgcgggccttcctgctatagaggctccgtacactgtgcccacaatttgcgtcacaacagcaattaccctgctagtggtattttacgatgtggtctatgcgaggcaagacaccgctgacgacttaaaaagtggggtgaaaggcatggcagtgcttttccgtaactatgtcgagattctactaacatctatcacgttagttattgctggtcttattgctacgacgggggttctggttgacaacggtccgtatttttttgtctttagcgttgcggggttacttgctgctttattggcgatgatcggaggcataaggtacaggatttttcacacatggaactcctactcaggctggttttacgcgcttgctatctttaaccttctagggggctacttgattgagtacttggaccaagtgccgatgctaaataaagcgtgactcgagcatgcatctagagggccgcatcatgtaattagttatgtcacgcttacattcacgccctccccccacatccgctctaaccgaaaaggaaggagttagacaacctgaagtctaggtccctatttatttttttatagttatgttagtattaagaacgttatttatatttcaaatttttcttttttttctgtacagacgcgtgtacgcatgtaacattatactgaaaaccttgcttgagaaggttttgggacgctcgaaggctttaatttgcggccctgcattaatgaatcggccaacgcgcggggagaggcggtttgcgtattgggcgctcttccgcttcctcgctcactgactcgctgcgctcggtcgttcggctgcggcgagcggtatcagctcactcaaaggcggtaatacggttatccacagaatcaggggataacgcaggaaagaacatgtgagcaaaaggccagcaaaagcccaggaaccgtaaaaaggccgcgttgctggcgtttttccataggctccgcccccctgacgagcatcacaaaaatcgacgctcaagtcagaggtggcgaaacccgacaggactataaagataccaggcgtttccccctggaagctccctcgtgcgctctcctgttccgaccctgccgcttaccggatacctgtccgcctttctcccttcgggaagcgtggcgctttctcatagctcacgctgtaggtatctcagttcggtgtaggtcgttcgctccaagctgggctgtgtgcacgaaccccccgttcagcccgaccgctgcgccttatccggtaactatcgtcttgagtccaacccggtaagacacgacttatcgccactggcagcagccactggtaacaggattagcagagcgaggtatgtaggcggtgctacagagttcttgaagtggtggcctaactacggctacactagaaggacagtatttggtatctgcgctctgctgaagccagttaccttcggaaaaagagttggtagctcttgatccggcaaacaaaccaccgctggtagcggtggtttttttgtttgcaagcagcagattacgcgcagaaaaaaaggatctcaagaagatcctttgatcttttctacggggtctgacgctcagtggaacgaaaactcacgttaagggattttggtcatgagattatcaaaaaggatcttcacctagatccttttaaattaaaaatgaagttttaaatcaatctaaagtatatatgagtaaacttggtctgacagttaccaatgcttaatcagtgaggcacctatctcagcgatctgtctatttcgttcatccatagttgcctgactccccgtcgtgtagataactacgatacgggagcgcttaccatctggccccagtgctgcaatgataccgcgagacccacgctcaccggctccagatttatcagcaataaaccagccagccggaagggccgagcgcagaagtggtcctgcaactttatccgcctccattcagtctattaattgttgccgggaagctagagtaagtagttcgccagttaatagtttgcgcaacgttgttggcattgctacaggcatcgtggtgtcactctcgtcgtttggtatggcttcattcagctccggttcccaacgatcaaggcgagttacatgatcccccatgttgtgcaaaaaagcggttagctccttcggtcctccgatcgttgtcagaagtaagttggccgcagtgttatcactcatggttatggcagcactgcataattctcttactgtcatgccatccgtaagatgcttttctgtgactggtgagtactcaaccaagtcattctgagaatagtgtatgcggcgaccgagttgctcttgcccggcgtcaatacgggataatagtgtatcacatagcagaactttaaaagtgctcatcattggaaaacgttcttcggggcgaaaactctcaaggatcttaccgctgttgagatccagttcgatgtaacccactcgtgcacccaactgatcttcagcatcttttactttcaccagcgtttctgggtgagcaaaaacaggaaggcaaaatgccgcaaaaaagggaataagggcgacacggaaatgttgaatactcatactcttcctttttcaatgggtaataactgatataattaaattgaagctctaatttgtgagtttagtatacatgcatttacttataatacagttttttagttttgctggccgcatcttctcaaatatgcttcccagcctgcttttctgtaacgttcaccctctaccttagcatcccttccctttgcaaatagtcctcttccaacaataataatgtcagatcctgtagagaccacatcatccacggttctatactgttgacccaatgcgtctcccttgtcatctaaacccacaccgggtgtcataatcaaccaatcgtaaccttcatctcttccacccatgtctctttgagcaataaagccgataacaaaatctttgtcgctcttcgcaatgtcaacagtacccttagtatattctccagtagatagggagcccttgcatgacaattctgctaacatcaaaaggcctctaggttcctttgttacttcttctgccgcctgcttcaaaccgctaacaatacctgggcccaccacaccgtgtgcattcgtaatgtctgcccattctgctattctgtatacacccgcagagtactgcaatttgactgtattaccaatgtcagcaaattttctgtcttcgaagagtaaaaaattgtacttggcggataatgcctttagcggcttaactgtgccctccatggaaaaatcagtcaagatatccacatgtgtttttagtaaacaaattttgggacctaatgcttcaactaac

SEQ ID NO: 116 - DNA, 6775 bp, Artificial Sequence
  PLAS384
tccagtaattccttggtggtacgaacatccaatgaagcacacaagtttgtttgcttttcgtgcatgatattaaatagcttggcagcaacaggactaggatgagtagcagcacgttccttatatgtagctttcgacatgatttatcttcgtttcctgcaggtttttgttctgtgcagttgggttaagaatactgggcaatttcatgtttcttcaacactacatatgcgtatatataccaatctaagtctgtgctccttccttcgttcttccttctgttcggagattaccgaatcaaaaaaatttcaaagaaaccgaaatcaaaaaaaagaataaaaaaaaaatgatgaattgaattgaaaagctagcttatcgatgataagctgtcaaagatgagaattaattccacggactatagactatactagatactccgtctactgtacgatacacttccgctcaggtccttgtcctttaacgaggccttaccactcttttgttactctattgatccagctcagcaaaggcagtgtgatctaagattctatcttcgcgatgtagtaaaactagctagaccgagaaagagactagaaatgcaaaaggcacttctacaatggctgccatcattattatccgatgtgacgctgcagcttctcaatgatattcgaatacgctttgaggagatacagcctaatatccgacaaactgttttacagatttacgatcgtacttgttacccatcattgaattttgaacatccgaacctgggagttttccctgaaacagatagtatatttgaacctgtataataatatatagtctagcgctttacggaagacaatgtatgtatttcggttcctggagaaactattgcatctattgcataggtaatcttgcacgtcgcatccccggttcattttctgcgtttccatcttgcacttcaatagcatatctttgttaacgaagcatctgtgcttcattttgtagaacaaaaatgcaacgcgagagcgctaatttttcaaacaaagaatctgagctgcatttttacagaacagaaatgcaacgcgaaagcgctattttaccaacgaagaatctgtgcttcatttttgtaaaacaaaaatgcaacgcgacgagagcgctaatttttcaaacaaagaatctgagctgcatttttacagaacagaaatgcaacgcgagagcgctattttaccaacaaagaatctatacttcttttttgttctacaaaaatgcatcccgagagcgctatttttctaacaaagcatcttagattactttttttctcctttgtgcgctctataatgcagtctcttgataactttttgcactgtaggtccgttaaggttagaagaaggctactttggtgtctattttctcttccataaaaaaagcctgactccacttcccgcgtttactgattactagcgaagctgcgggtgcattttttcaagataaaggcatccccgattatattctataccgatgtggattgcgcatactttgtgaacagaaagtgatagcgttgatgattcttcattggtcagaaaattatgaacggtttcttctattttgtctctatatactacgtataggaaatgtttacattttcgtattgttttcgattcactctatgaatagttcttactacaatttttttgtctaaagagtaatactagagataaacataaaaaatgtagaggtcgagtttagatgcaagttcaaggagcgaaaggtggatgggtaggttatatagggatatagcacagagatatatagcaaagagatacttttgagcaatgtttgtggaagcggtattcgcaatgggaagctccaccccggttgataatcagaaaagccccaaaaacaggaagattgtataagcaaatatttaaattgtaaacgttaatattttgttaaaattcgcgttaaatttttgttaaatcagctcattttttaacgaatagcccgaaatcggcaaaatcccttataaatcaaaagaatagaccgagatagggttgagtgttgttccagtttccaacaagagtccactattaaagaacgtggactccaacgtcaaagggcgaaaaagggtctatcagggcgatggcccactacgtgaaccatcaccctaatcaagttttttggggtcgaggtgccgtaaagcagtaaatcggaagggtaaacggatgcccccatttagagcttgacggggaaagccggcgaacgtggcgagaaaggaagggaagaaagcgaaaggagcgggggctagggcggtgggaagtgtaggggtcacgctgggcgtaaccaccacacccgccgcgcttaatggggcgctacagggcgcgtggggatgatccactagtacggattagaagccgccgagcgggtgacagccctccgaaggaagactctcctccgtgcgtcctcgtcttcaccggtcgcgttcctgaaacgcagatgtgcctcgcgccgcactgctccgaacaataaagattctacaatactagcttttatggttatgaagaggaaaaattggcagtaacctggccccacaaaccttcaaatgaacgaatcaaattaacaaccataggatgataatgcgattagttttttagccttatttctggggtaattaatcagcgaagcgatgatttttgatctattaacagatatataaatgcaaaaactgcataaccactttaactaatactttcaacattttcggtttgtattacttcttattcaaatgtaataaaagtatcaacaaaaaattgttaatatacctctatactttaacgtcaaggagaaaaaaccccggatcggactactagcagctgtaatacgactcactatagggaatattaagcttaaacaatgagccccaaagtatccagcatgccctacacaaatcctagatacgagagcgggccattatccttgatccctaaatccatcgtaccgtatttcgaacttatgaggttcgaactaccacacggttactatctagggtattttcctcacttagtgggaataatgtacggagcttcagcgggtcccgaacgtctaccagctagggatcttgtttttcaagcgttattatacgtgggatggacttttgccatgcgtggagcagggtgtgcctggaacgataacatcgaccaggacttcgatcgtaagacagagaggtgcaggacaagacctatcgcacgtggggccgtgtctacaactgctgggcatatttttgccgtcgcaggcgttgcactagcatttttgtgcctaagcccattaccgaccgagtgccaccaacttggtgttttggttacggtcctaagtgtaatatatccattctgtaagagatttacgaactttgctcaggttattttgggtatgacattagcggcaaattttattttagctgcatatggagctgggcttcccgctttggagcaaccatataccaggccgactatgtttgcaactcttgcgatcacattgttagtagttttctacgacgtggtctacgcaaggcaggacaccgctgacgatttaaagagcggtgtaaaaggcatggccgtactgttccgtaatcacatcgaggtcctgttggctgttttaacatgcactattggaggactgctggcagcaacaggcgtgtccgttggcaatggaccctattattttctattctcagtagcgggtttaactgtagcattactagccatgataggtggaatccgttacaggatatttcatacgtggaatgggtacagtggatggttttatgtcttagctataataaaccttatgtccggttattttatcgagtacttagataacgcacccatactggcacgtgggtcctgactcgagcatgcatctagagggccgcatcatgtaattagttatgtcacgcttacattcacgccctccccccacatccgctctaaccgaaaaggaaggagttagacaacctgaagtctaggtccctatttatttttttatagttatgttagtattaagaacgttatttatatttcaaatttttcttttttttctgtacagacgcgtgtacgcatgtaacattatactgaaaaccttgcttgagaaggttttgggacgctcgaaggctttaatttgcggccctgcattaatgaatcggccaacgcgcggggagaggcggtttgcgtattgggcgctcttccgcttcctcgctcactgactcgctgcgctcggtcgttcggctgcggcgagcggtatcagctcactcaaaggcggtaatacggttatccacagaatcaggggataacgcaggaaagaacatgtgagcaaaaggccagcaaaagcccaggaaccgtaaaaaggccgcgttgctggcgtttttccataggctccgcccccctgacgagcatcacaaaaatcgacgctcaagtcagaggtggcgaaacccgacaggactataaagataccaggcgtttccccctggaagctccctcgtgcgctctcctgttccgaccctgccgcttaccggatacctgtccgcctttctcccttcgggaagcgtggcgctttctcatagctcacgctgtaggtatctcagttcggtgtaggtcgttcgctccaagctgggctgtgtgcacgaaccccccgttcagcccgaccgctgcgccttatccggtaactatcgtcttgagtccaacccggtaagacacgacttatcgccactggcagcagccactggtaacaggattagcagagcgaggtatgtaggcggtgctacagagttcttgaagtggtggcctaactacggctacactagaaggacagtatttggtatctgcgctctgctgaagccagttaccttcggaaaaagagttggtagctcttgatccggcaaacaaaccaccgctggtagcggtggtttttttgtttgcaagcagcagattacgcgcagaaaaaaaggatctcaagaagatcctttgatcttttctacggggtctgacgctcagtggaacgaaaactcacgttaagggattttggtcatgagattatcaaaaaggatcttcacctagatccttttaaattaaaaatgaagttttaaatcaatctaaagtatatatgagtaaacttggtctgacagttaccaatgcttaatcagtgaggcacctatctcagcgatctgtctatttcgttcatccatagttgcctgactccccgtcgtgtagataactacgatacgggagcgcttaccatctggccccagtgctgcaatgataccgcgagacccacgctcaccggctccagatttatcagcaataaaccagccagccggaagggccgagcgcagaagtggtcctgcaactttatccgcctccattcagtctattaattgttgccgggaagctagagtaagtagttcgccagttaatagtttgcgcaacgttgttggcattgctacaggcatcgtggtgtcactctcgtcgtttggtatggcttcattcagctccggttcccaacgatcaaggcgagttacatgatcccccatgttgtgcaaaaaagcggttagctccttcggtcctccgatcgttgtcagaagtaagttggccgcagtgttatcactcatggttatggcagcactgcataattctcttactgtcatgccatccgtaagatgcttttctgtgactggtgagtactcaaccaagtcattctgagaatagtgtatgcggcgaccgagttgctcttgcccggcgtcaatacgggataatagtgtatcacatagcagaactttaaaagtgctcatcattggaaaacgttcttcggggcgaaaactctcaaggatcttaccgctgttgagatccagttcgatgtaacccactcgtgcacccaactgatcttcagcatcttttactttcaccagcgtttctgggtgagcaaaaacaggaaggcaaaatgccgcaaaaaagggaataagggcgacacggaaatgttgaatactcatactcttcctttttcaatgggtaataactgatataattaaattgaagctctaatttgtgagtttagtatacatgcatttacttataatacagttttttagttttgctggccgcatcttctcaaatatgcttcccagcctgcttttctgtaacgttcaccctctaccttagcatcccttccctttgcaaatagtcctcttccaacaataataatgtcagatcctgtagagaccacatcatccacggttctatactgttgacccaatgcgtctcccttgtcatctaaacccacaccgggtgtcataatcaaccaatcgtaaccttcatctcttccacccatgtctctttgagcaataaagccgataacaaaatctttgtcgctcttcgcaatgtcaacagtacccttagtatattctccagtagatagggagcccttgcatgacaattctgctaacatcaaaaggcctctaggttcctttgttacttcttctgccgcctgcttcaaaccgctaacaatacctgggcccaccacaccgtgtgcattcgtaatgtctgcccattctgctattctgtatacacccgcagagtactgcaatttgactgtattaccaatgtcagcaaattttctgtcttcgaagagtaaaaaattgtacttggcggataatgcctttagcggcttaactgtgccctccatggaaaaatcagtcaagatatccacatgtgtttttagtaaacaaattttgggacctaatgcttcaactaac

SEQ ID NO: 117 - DNA, 2177 bp, Artificial Sequence; identical to SEQ ID NO: 14
  OAC

SEQ ID NO: 118 - protein, 434 aa, Artificial Sequence
  Consensus sequence for recombinant PTase
  MISC_FEATURE (1)..(434): Xaa is any amino acid
XXXXXXXXXXXXXXXXXXXXXXXXXXXXXXXXXXXXXXXXXXXXXXXXXXXXXXXXXXXXXXXXXXXXXXXXXXXXXXXXXXMSXXSELDELYSAIEESARLLDVXCSRDKVXPVLTAYGDXXAXXXXVIAFRVXTXXRXXGELDYRFXXXPXXXDPYXXALSNGLIXETDHPXXXXXVGSLLSDIRERXPIXSYGXXXXIDFGVVGGFKKIWXFFPXDXMQXVSELAEIPSMPXSLADHXDXFARHGLXDKVXLIGIDYXXKTVNVYFXXLXAEXXEXEXXXVXSMLRELGLPEPSDQMLXLXXKAFXIYXTXSWDSPRIERLCFXVXTXXXXDPXXLPXXXVXIEPXIEKFXXXVXXVPYXXXGXXRRFVXYAXXXSPEXGEYYKLXSYYQXXPXXLDXMXXXXXXXXXXXXXXXXXXXXXXXXXXXXXXXX

SEQ ID NO: 119 - DNA, 5372 bp, Artificial Sequence; identical to SEQ ID NO: 19
  pET21d(+) Empty Vector

SEQ ID NO: 120 - DNA, 1221 bp, Artificial Sequence
  PKS8
atgtcctctccacataatgctgttttgactggttttaccccagttcaattggctaaaccagttccacaagccttgactttggaattgtctgcttatgcttttgctagagcctactgtattaagaacggtgttggtactgatgatgaagctggttttgctaaggtttaccagtctgtcaaagaaaagttcgacaagtacgctttatcctccgctcaaatcaaaagaaggcagttgatattcttcccaaaggtttccgatattcatttcgctaacggtcatgttgatattgctgctccagaacatgcttacttgaagttgtatgatatggctactgatccaagaggttccgatttgaaagttagacatgaatcctacgccaaggttgttgatcaaggtttggaaagaatgttccaagattctgctgaagctccagatgatttgattcatgttacttgctctggttacttgtctccatctccagttgaaagaatggctgctgatagaggttggtttgaaactactgttacccattcttaccatatgggttgttatggtgctttcccagctattaagatggctcatggtatgttgtcctcttctagatttggtgttactccagttaagcacagagttgatatagttcataccgagttgttgtccgctcataacaatatcgttgatgctagagccgaaaacattatcactatgactttgttcgctgacggcttgattaagtactctgttttgtctgaagaagagttgcatagacaaggtggtcatggtttgagagttttggctatgaatgaacacttgttgccagattcagctgacgaaatgacttgggttccaggttctcatcaattcttgatgactttgactccaatggttccagttgttatcaagagacacgttagagatttcgtcgtcaagttgttggaaagggctggtattgattacgaaagagaaagattggaattgaccttcgctattcatccaggtggtccaaaaatcgttgaacacattcaagaagatttgggcttgtccgatgaacaagttgctatttctaagtccgtgttcttggaaaacggtaacatgtcatctgctaccattccacatatcttgaagcaagttttggaagaagttgacgttggtactagagttttgtgtttgggttttggtccaggtttgactgttactggtatggttttggaaaaaatttga

SEQ ID NO: 121 - DNA, 1194 bp, Artificial Sequence
  PKS10
atgccaggtgctactactgctgctatagttgattctagaagaggtactcaacattctgaaggtccagctactattttggctattggtactgctaacccagagaacattatgttccaagataacttcgccgattactacttcggtttgactaagtctgaacacttgaccgagttgaaagaaaagatgaagagaatctgccacaagtccggtatcgaaaagagatatattcatttggacgccgagttgatctctgttcatccagaaattattgacaagcacttgccatctttggaaaccagagttgatatagttgctaccgaagttccaaagttggctgaatctgctgctagaaaagctattgctgaatggggtagaccagctactgatattactcatttgatcttctctacctactctggttgtagagcaccatctgctgacttgcaattggcttctttgttgggtttaagaccatctgtttccagaaccatcttgtcattgcatggttgttctggtggtggtagagctttacaattggctaaagaaattgccgaaaacaacagaggtgccagagttttgattgcttgttctgaattgaccttgatctgtttctctaccccagatgaatccaagattattggtcatggtttgtttggtgatggtgctggtgctgttatagttggtgctgatccatctgttgatggtgaatgtccattattcgaaatggttgctgcttcccaaactatgattccaggtactgaacatgctttgggtatgcaagctacttcttctggtattgatttccacttgtccattcaagttccaacgttgatcaaggataacatccatcaatgtttgttgaacgccttcagatctgttggtaatactgatccaaattggaacgatttgttctgggctgttcatcctggtggtagggctattttggataacattgaagataagttgcagttgcacccatgtaaattggctgcttctagacaagttttgtccgaatacggtaatatgtctggtgctactattgccttcgttttggatgaattgagaagaagaagggaaaaagaacaagacatccaacaacaaccagaatggggtgttttgttggcttttggtccaggtgttactatcgaatctatcgttttgagaaacccattgtccaggggtttgaaagaaaac

SEQ ID NO: 122 - DNA, 1197 bp, Artificial Sequence
  PKS17
atgccaggtgctgctactactgctgctgttgttgattctagaagatctgctcaaagagctgaaggtccagctactattattgctattggtactgctaatccagccaacatagttccacaagataatttcgctgattactacttcggtttgaccaagtctgaacatttgactgaattgaaggacaagatgaagaggatctgtaagaagtccggtattgaaaagaggtacatccatttggacgaagaaattatcagagcccatccagaaattatcgataagcaccaaccatctttggaagccagagttgaaattgctgctgctgaagttccaaaattggctgaatctgctgctagaaaagctattgctaaatggggtagaccagctactgatattacccatttgattttctctacctactctggttgtagagcaccatctgctgacttgcaattggcttctttgttgggtttaagaccatctgtttccagaaccatcttgtcattgcatggttgttctggtggtggtagagctttacaattggctaaagaattggccgaaaacaacagaggtgctagagttttggttgctttgtctgaattgaccttggtttgtttctctaccccagatgaatctaagatagttggtcatggtttgtttggtgatggtgctggtgctattatagttggtgctggtccattttctgatggtgaatgtccattattcgaaatggttgctgcttcccaaactatgattccaggtactgaacatgctttgggtatgcaagctacttctactggtattgatttccacttgtctgttcaagtcccaatgttgatcaaggacaacatccaacaatccttgttggaatcctttcaatctgttggttacactgatccagattggaacaatttgttttgggctgttcatccaggtggtagagcaattttggataacatcgaaggtaaattgcaattgcagccatggaaattggctgcttctagacaagttttgagagaattcggtaatatgtccggtgctactattgctttcgttttggatgaattgtgccatagaagagaaaaggatgaggacgaatctcaacaacatgaatggggtgttatgttggcttttggtccaggtattactatcgaaaccatcgttatgagaaacccattggctagaggtttgaagcaaaac

SEQ ID NO: 123 - DNA, 1335 bp, Artificial Sequence
  PKS20
atggctgcttctactgttgctggtgaattgggtttgtctattactggtttgggtgttcaatacccaccatattctttgggtccagatgccattgatatcttgtctaaaagataccacccagaatctccagctatgaagaaagttttggccattaacagatacaccggtatcgatcaaagatcctctattggtaatccagatcacccattggttaacaaacctaatccaccaactgtcaaagaattgcacgaagtttttatgtccgatggtgttccattggctgttgaagctagtagaaaagctatggctgaagctagattggttccagctcaaattactcatatggtttctactacctgtaccgattctgctaatccaggttatgatcattacgtcgctaaagaattgggcttgtctgatagattggaaaaggttttgttgcatggtattggttgttctggtggtttggctgctttgagaactgctgctaatttgtgtttgggtcatactgctagaggtaagccagctagaattttggttttggctttggaagtttctaccaccatggttagatctgaattggaatctattgacgccttgcaagaaaccagaattggtattgctttgttctctgattgtgcctccgctgttattttgtctaatggtattggtgaagctccaggtaaaccagctatctatgatttgttgggttgggaaaacagagttatcccagattctgaacatgatttgggtttcgatgttgatccaatgggttggaaagttgttttgtctccaagagttccagttttggctaaggcttctttacaacctacttacgctgatttgttgtcctccttgcaagatcaattgccatcttcttatcaaaagccagctgattttgattgggctatgcatccaggtggtgctactattttgtctggtgctgaatctgctatgggtttgactccagaacatatgagagcatcttacgataggtacatcaaccatggtaattcttcatccgctaccatcttctctgttttgaacagattgagagaaaaggatatggatgctttggctccaggtggtaaagtcaaagaatatgttgttggttgtgctttcggtccaggtattaacgttgaaatgtgtatgttgaagagaaggatgaatgctccagctagaactactactggtttagatactccaccagaaaccgatgattctgaaggtccaggtccaggttcttctgctggttctgatgatggtgaatctattgaaggtggtgagaaagaagagaagttcattaacgaagccttggacaacgttgaattggac

SEQ ID NO: 124 - DNA, 1206 bp, Artificial Sequence
  PKS22
atggccccattgattcatggtacttctccaccagaaatcagaaaccattctgacgattctttgtccaagagagctgtttctgttgttggtactggtgctcattatccaccacatgaattgagatctgacgaattggaaaagttgatctccgcttttcatgatccaaatgatccagctgttagaaagaccttgtacgtcaacgaaaagtccagaattcaaactagaagggctgctgttccatttgatgatccattttggtctgatccaaagttgccagatattgccgaatgtgatgttttgttcagaaagtacggtgttccagttgctgaagaagctgctagaaaggctttggctgattggaatggttctttcaacgatttgacccacgttgttgttgttacttgtactaatactgctaacccaggtttggattacatgatctgtgaaagattgggtttgagaaagaacgtccaaagaactttgttgcatggtgttggttgtgctggtggtgctgctgctttgagaactgctaatgaattgctattgggtgctgcttttcaaggtaaaccaggtagagctttggttgttgcttgtgaaatctgcatgattttcttcaggtccatgttggaagatatcgttaaggctcaagaggctaatgttgctatgactttgtttggtgatggtgctggtgctatggttttgtctaatggtatttgtccaaagacctctgaaagggctccattgtggaatattttgaactgtagaaccaccttgttggaggattctgcttcttctattcagttcaacattagaccacatggttacgatccagtcatcacaaaagaagttccaggtcaaacttctgctgctttgccatctggttttcaagacttgatttcttctaccccatccttgtactctgacaagtctaattttgacccatcctcttacgattgggctttacatccaggtggttattctattgctgttttggctcaaaacgctttgggtattactgaacatcatttgagaaagacctacgaggtctatagatctagaggtaacacttcttcctccaccgttatttccgttattaacgaattggctagagaacaaggtacttccgaatctggtagagataaggttatagttgctgcttttggtccaggtattactatggaattggctgttatggctagaccagct

SEQ ID NO: 125 - DNA, 663 bp, Artificial Sequence
  PKS25
atggtgtccgttgaagaaattagaaaggctcaaagagctgaaggtccagctactgttatggctattggtactgctactccaccaaattgtgttgatcaatctacttacccagactactacttcagaatcaccaactctgaacatatgaccgaattgaaagaaaagttcaagaggatgtgcgacaagtccatgattaagaaaaggtacatgtacttgaacgaagaaatcttgaaagaaaacccatccgtttgtgcttatatggctccatctttggatgctagacaagatatggttgttatggaagttccaaagttgggtaaagaagctgctactaaggctatcaaagaatggggtcaacctaagtctaagatcacccatttgattttctgtaccacctctggtgttgatatgccaggtgctgattatcaattgactaagttgttgggtctaaggccatccgttaagagatatatgatgtaccaacaaggttgtttcgctggtggtactgttttgagattggctaaagatttggccgaaaacaacaaaggtgctagagttttggttgtctgctctgaaattactgctgttacttttagaggtccaaccgatactcatttggattctttggttggtcaagccttgtttggtgatggtgctgctgct

SEQ ID NO: 126 - DNA, 1194 bp, Artificial Sequence
  PKS26
atggctgctactactactccaaccattgaagaaattagaaaggctcaaagagcttctggtccagctactgttttggctattggtactgctactccatctaactgtgtttctcaagctgattacccagactactacttcagaattaccaactctgaacacaagaccgaattgaaagaaaagttcaagaggatgtgcgaaaagtccatgatcaagaaaaggtacatgcacttgaccgaagaattcttgaaagaaaacccaaacatgtgcgcttacatggctacatctttggatgctagacaagatatcgttgttgttgaagttccaaagttgggtaaagaagctgcttctaaggctatcaaagaatggggtcaacctaagtctaagatcacccatttgattttctgtaccacctctggtgttgatatgccaggtgctgattatcaattgactaagttgttgggtctaaggccatctgttaagagattcatgatgtaccaacaaggttgttttgctggtggtactgttttgagattggctaaagatttggccgaaaacaacaaaggtgctagagttttggttgtctgctctgaaattactgctgttacttttagaggtccatccgatactcatttggattctttggttggtcaagccttgtttggtgatggtgctgctgctgttatagttggtgctgatccagataccaaaatcgaaagaccactataccaattggtttctgctgctcaaactatcttgccagattctgatggtgctattgatggtcatttgagagaagttggtttgaccttccatttgttgaaagatgtcccaggcttgatctccaagaacattgaaaaatctttggtcgaagccttcaccccaattggtattaacgattggaattccattttctggattgctcatccaggtggtccagctattttggatcaagttgaagctaagttgggcttgaaagaagaaaagatgagagctaccagacacgtcttgtctgaatatggtaatatgtcctctgcttgcgtcttgttcattttggacgaaatgagaaagaagtccttgaaagaaggtaaggctactactggtgaaggtttggattggggtgttttgtttggttttggtccaggtttgactgttgaaactttggtcttgcattccgttccaattgaaccagctcat

SEQ ID NO: 127 - DNA, 1362 bp, Artificial Sequence
  PKS27
atggtttccgttggtgaaatcagaaagtctcaaagagctgaaggtccagctactgttttggctattggtactgctactccagctaattgtgtttaccaagctgattacccagactactacttcagaattaccaactctgaacacatgaccgaattgaaagaaaagttcaagagaatgtgcgacaagtccatgattaacaagaggtacatgcacttgaacgaagaaatcttgaaagaaaacccaaacgtttgcgcttatatggctccatctttggatgctagacaagatatggttgttgttgaagttccaaagttgggtaaagaagctgctgttaaggctatcaaagaatggggtcaacctaagtctaagatcacccatttggttttctgtactacctctggtgttgatatgccaggtgctgattatcaattgactaagttgttgggtttgaagccatccgttaagagattgatgatgtaccaacaaggttgttttgctggtggtactgttttgagattggctaaagatttggctgaaaacaatgctggtgctagagttttggttgtttgctctgaaattactgccgttacttttagaggtccatctgatactcatttggattctttggttggtcaagccttgtttggtgatggtgctgctgctattatcattggtgctgatccagataccaagatcgaaagaccattattcgaattggtttctgctgcccaaactatcttgccagattctgaaggtgctattgatggtcatttgagagaagttggtttgaccttccatttgttgaaagatgtcccaggcttgatctccaagaacattgaaaaatctttggtcgaagccttcaagccaattggtatttctgattggaattccttgttctggattgctcatccaggtggtccagctattttggatcaagttgaattgaagttgggcttgaaagaagaaaagttgagagctaccagacacgtcttgtctgaatatggtaatatgtcctctgcttgcgtcttgttcattttggacgaaatgagaaagaagtccatcgaagaaggtaaaggtactactggtgaaggtttggaatggggtgttttgtttggttttggtccaggtttgactgttgaaactgttggtgttgctcaaccatgttacaccattgattctttgtctcactcttctggttacaacactgaaggtaaaatgggtatggctgctggtttgggtactggtgaagattgcatgtcatcttgtgctaacttgagatcttacccatctttcttgtgctacgtcttgttgtacttctacgttttgttgtgtccatgtgctttctctccattcactttgaag

SEQ ID NO: 128 - DNA, 1176 bp, Artificial Sequence
  PKS31
atggctccaaccgttcaagaaattagaaaagctcaaagagctgaaggtccagctactgttttggctattggtactgctactccaccaaattgtgtttaccaagctgattacccagactactactttagagttaccaactctgatcacatgaccgacttgaaagaaaagtttagaagaatgtgcgacaagtcccaaattgagaaaaggtacatgtacttgaccgaagaaatcttgaaagaacacccaaacatgtgtgagtatatggctccatctttggattccagacaagatatggttgttaccgaagttccaaagttgggtaaagaagctgctcaaaaggctatcaaagaatggggtcaacctaagtctaagatcacccatgttattgtctgtactacctctggtgttgatatgccaggtgctgattatcaattgactaagttgttgggtctaaggccatctgttaagagattcatgatgtaccaacaaggttgttttgctggtggtactgttttgagaatggctaaagatttggccgaaaacaatagaggtgctagagttttggttgtctgctctgaaattactgctgtttgttttagaggtccaaccgatactcatttggattctatggttggtcaagccttgtttggtgatggtgctggtgctgttatagttggtgctgatccagatttgtctgttgaaaagccaatcttcgaattggtttggacctctcaaactatcttgccagattctgaaggtgctattgatggtcatttgagagaagttggtttgaccttccatttgttgaaagatgtcccaggcttgatctccaagaacattgaaaaatctttgaccgaagccttctccccattgaatattgctgattggaattccttgttctggattgctcatccaggtggtccagctattttggatcaagttgaagctaagttgggcttgaaagaagaaaagttgaaggctaccagacaagtcttgaatgattacggtaatatgtcctctgcttgcgtcttgtttattttggacgaaatgagaaaaaagtccttggaaaacggtcatgctactactggtgaaggtttggattggggtgttttgtttggttttggtccaggtttaactgttgaaaccgttgtcttgcattctgttccagttgctaat

SEQ ID NO: 129 - DNA, 1227 bp, Artificial Sequence
  PKS33
atgtacaacacctacacctacatccactactacaattactacatgatggcctccatctccgttgatcaaattagaaaagctcaaagagctaacggtccagctactgttttggctattggtactgctaatccaccaacatctttttaccaagctgattacccagacttctacttcagagttaccaagaatcaacacatgaccgaattgaaggacaagttcaagagaatttgtgaaaagaccaccatcaagaagaggcacttgtatttgactgaggatagattgaatcagcacccaaatttgttggagtatatggctccatctttgaacaccagacaagatatgttggttgtcgaaattccaaagttgggtaaagaagctgctatgaaggctatcaaagaatggggtcaacctaagtctagaatcacccatttgattttctgttccaccaacggtgttgatatgccaggtgctgattatgaatgtgctaagttgttgggtttgtcctcctcagttaagagagttatgttgtaccaacaaggttgtcatgctggtggttctgttttgagaattgctaaagatttggccgagaacaacaagggtgctagaattttgactgtcaactccgaaattaccatcggtatttttcattctccagacgaaacttacttcgatggtatggttggtcaagccttgtttggtgatggtgcttctgctactatagttggtgctgatccagacaaagaaattggtgaaagaccaatcttcgaaatggtttctgctgcccaagaattcattccaaattctcatggtgctgttgatggtcatttgactgaatctggtttggtttaccatatccacaaagatgtcccaggcttgatttccaagaacatcgaaaaatctttggtcgaagccttgaacccaattggtatttctgattggaattccttgttctggattactcatccaggtggtccaactattttgaatgctgttgaagctgaattgcaattgaagaaagagaagttggagatctctaggtacgtcttgtctgaatacggtaacatgtcatcctcttgcgttttcttcatcatggacgaattgagaaagagatccttgaaagaaggtaaatctactaccggtgatggttttgaatggggtgttttgtttggttttggtccaggtttgactgttgaaactttggtcttgcattccgttgccattaagaac

SEQ ID NO: 130 - DNA, 1212 bp, Artificial Sequence
  PKS47
atgaggcatatcatcaagaccttgtacaacatcactaacatggaagaaatcaagggtgttttgaaggctaaggatgttggttgtgttgctaccattttggctattggtactgctaatccattgaactgcgttaaccaggatgaattcttgcactcttacttcaagttgaccaacaaccacaacaacacctcattcaaagagttgttcaccagaatctgcaacaactccatgattaagaacaggtacatgcacttgaccgaggacattttgaaagaaaacccaaacttgtgtgattacgctgcccaatctttgaacactagacaagacatcaagatcaaagaaatcccaaagttggctgaaagggctgctatggttgctatcaaagaatggggtaagccaatttctaacttgacccatatcatcttccattcttctactggtgctgctgatatgccaggtgctgattatcaattggttaagtctttgggtttgaacagatccatcaagaggatcatgttgtacaacttgggttgttttgctggtggtactgttttgagagttgccaaagatttggtcgaaaacaatttgggtgcttccgttttggctgtttgtgctgaaattacttctgctgatgctactttcggtaggttgtctgaagatgataagggtagattggttggtcatgctatttttggtgatggtgctgctgctttggttattggtaatgctgatgatccagaaaacaagggtttgttccaaatcgtttctacctcccaaactatcttgccaaattctgaaggttgcatcgaaggtcatattagagaagatggtgttaccttcactttgtctccaagagttccaaagttgatcggtgataacattgaaacctgtttgatggaagccttcaccccattcaaaatttctgattggaattccttgttctgggttgttcatccaggtggtgctgctattttgagagaagttgaatctagagtcggtttggaacaagaaaagttgagagcttcttggcacgttttgagagaatacggtaatatttcctccgcctccgttttgtttattttggacgaaatgaggaacaagtccttggaagaaggtagaaaaactactggtgaaggtaagaattggggtgttttgtttggttttggtccaggtttgactgttgaaactgttgtcttgcattccatcccaatc

SEQ ID NO: 131 - DNA, 1176 bp, Artificial Sequence
  PKS48
atggcctccgttgaagaaattagaaatgctcaaagagctaagggtccagctactgttttggctattggtactgctactccagataattgcttgtaccaatctgatttcgccgactactacttcagagttactaagtctgaacacatgaccgagttgaagaaaaagttcaacagaatctgcgacaagtccatgatcaagaagagatactctcatttgaccgaagagatgttggaagaacatccaaatattggtgcttacatggctccatccttgaacattagacaagaaattatcaccgccgaagttccaaagttgggtaaagaagctgctttgaaggctttgaaagaatggggtcaacctaagtctaagatcacccatttggttttctgtactacctctggtgttgaaatgccaggtgctgattacaaattggctaatttgttgggtttggaaacctccgttagaagagttatgttgtaccatcaaggttgttatgctggtggtactgttttgagaactgctaaagatttggctgaaaacaatgctggtgctagagttttggttgtttgctctgaaattaccgttgttactttcagaggtccatctgaaactgctttggattctttggttggtcaagccttgtttggtgatggttctgctgctgttatagttggttctgatccaaacttgtccatcgaaagacctttgttccaattggtttctgctgctcaaactttcattccaaatacccaaggtgctattgctggtaacttgagagaagttggtttgacttttcatttgtggccaaacgttccaaccttgatctctgaaaacattgaaaagtgtttgacccaagccttcgatccaattggtatttctgattggaattccttgttctggattgctcatccaggtggtccagctattttggatgctgttgaagctaaattgtccttggacaagcaaaagttgaaggctactagacacgttttgtctgaatacggtaatatgtcctctgcttgcgttttgttcattatggacgaaatgaggaagaagtccttgaaagaagaaaagactactaccggtgaaggtttggattggggtgttttgtttggttttggtccaggtttgactatcgaaaccgttgttttgagatccatcccaagagattctaat

SEQ ID NO: 132 - DNA, 1194 bp, Artificial Sequence
  PKS49
atgactactggtaaggttaccttggaagctgttagaaaagctcaaagagctgaaggtccagctactgttttggctattggtactgctactccagctaattgtgtttaccaagctgattacccagactactacttcagagttactaagtctgaacacttgaccgacttgaaagaaaagttcaagagaatctgccacaagtccatgatcagaaaaaggtacatgcatttgaccgaggacatcttggaagaaaatccaaacatgtcatcttactgggctccatctttggatgctagacaagatattttgatccaagaaatcccaaagttgggtgctgaagctgctgaaaaggctttgaaagaatggggtcaacctagatctagaatcacccatttggttttctgtactacctctggtgttgatatgccaggtgctgattatcaattgatcaagttgttgggtttgtgcccatctgttaatagagctatgatgtaccatcaaggttgttttgctggtggtatggttttgagattggctaaagatttggccgaaaacaatagaggtgctagagttttgatcgtctgctctgaaattactgttgttactttcagaggtccatccgaatctcatttggattctttggttggtcaagccttgtttggtgatggtgctgctgctgttatagttggtgctgatccatctgaaccagctgaaagaccattattccatttggtttctgcctcccaaactatcttgccagattctgaaggtgctattgaaggtcatttgagagaagttggtttgacctttcacttgcaagatagagttccacagttgatctccatgaacattgaaaggttgttggaagatgcttttgccccattgggtatttctgattggaattccattttctgggttgctcatccaggtggtccagctattttgaatatggttgaagctaaagtcggtttggataaggctagaatgtgtgctactagacatattttggctgagtacggtaatatgtcctctgtttgcgttttgttcatcttggacgaaatgagaaacagatctgctaaagatggtcataccactactggtgaaggtatggaatggggtgttttgtttggttttggtccaggtttgactgttgaaaccatcgttttacattccgttccaattactactgttgctgcc

SEQ ID NO: 133 - DNA, 1143 bp, Artificial Sequence
  PKS54
atggctagaaagccaaatggtgttgctaacgttttggctattggtactgctgttccaccaacttcatttccacaatcttcatacccagagtactttttcagagctactaagtctactgacaagccagaaatgatgcaaaagttccaaagaatctgcgacagatccggtattaagaagagacatttttacttgacctccgaaatcttggaaaagaacccagaaatctgctcttatatgggtgcttctttggatgccagacaagaaattggtgttagagaagttccaatgttggctaaagaagctgcttctgctgctattgctgaatggggtcaacctaaatctgctattactcatttggttttgggcaccacctcttctattgatatgccaggtgctgattttcagttgttgaagttgttgggtttaaggccatctgttaagagagtcatgatctaccaacaaggttgttttgctggtggtactgttttgagaattgctaaagatttggccgagaacaacgaaaacgctagagttttggttgcttgctctgaaattactgctgttacttttagagccccatctgataagcacttggatggtttggttggttctgctttgtttggtgatggtgctgctgctttgatagttggtgctgatccaagaccaggtattgaaaaacctttgttcgaaatccattccgccattcaaactgttttgccagaatctgatggtgccattttgggtcatttgagagaatgtggtttggtgttccatttgttgaaagatgtcccaggtattatcgctaagaacttgggtaaagttttgggtggtatgttggatagagctggtgttgcttcttacaatgatttgttctgggttgttcatccaggtggtccagctattttggatcaaatggttgctagattgcagttggacgaagaaaaaatgagagctaccagacaagttttggctgactttggtaatatgtcctcctcttctgttttgttcgtcttggaagaaatgagaaagggttctactagagctggtatgagatctactggtgaaggttgtgattggggtattatgttgtgttttggtccaggtttgactgttgaagccttgttgttgaaatctaccgctgtt

SEQ ID NO: 134 - DNA, 1176 bp, Artificial Sequence
  PKS56
atgaagttggaaaacggtcaaaagatcggtagagttcacgaaagagctgaaggtccagctaagattttggctattggtactgctactccattccattgggttgatcaaacatcttacccagactactacttcaaggttaccaactctgaacacttggttgacttgaaagaaaagttcagaagaatctgctccaggaccatgatcagaaaaagacatatgttgttgaccgaagaaatcttgaaaaagaacccaaacttgtgctcttacaacggtccatctttggatatcagacaagacatcttggtttccgaaattccaaagttgggtaaagaagctgctttgatggctattgatgaatgggctcaacctaagtctaagatcactcatttggttttctgcactagatccggtgttgatatgccaggtgctgattatcaattgatcaagttgttgggtttgtccccatctgttcaaagattgatgatgtaccaacaaggttgttttgctggtggtactatgttgagattggctaaagatttggccgaaaacaacaaaggtgctagagttttggttgtttgcgctgaatcttctgctattggttttagaggtccatctgaagctcatccagataatttgattgctcaagccttgtttggtgatggtgctgttgctgttattattggttctgatccaaaaatgggtttggagaggccaattttcgaaatagtttctgctgctcaaaccttcgttccaaatggtgattgtcatttggcattgcacttgagagaaatgggtttgacttttcattgcaccagagatgttccaccaactattgctaagaacgttgaatcctgtttgatcaaggcttttgaaccattgggtatctctgattggaattccgttttttggatattgcatccaggtggtaatgccatcgttgatcaagtagaatctactttgggtttggaaccagataagttgagagctaccagaaacatcttgagagaatacggtaatttgtcctctgcttgcgttttgttcattttggacgaaatcagaaaaaagtccgccaggtatggtttgaaaactactggtgatggtttggatttgggtgtcttgttgtcttttggtccaggtttgactattgaaaccgttgttttgagatccgtcccaatc

SEQ ID NO: 135 - DNA, 1188 bp, Artificial Sequence
  PKS57
atggccccatccattgaagaaattagaaaagctcaaagagcttctggtccagctactattttggctattggtaaagctactccagctaactgtgtttctcaagctgattatccagactactacttcagaatcaccaactctgaacatatgaccgaattgaaagaaaagttcaagaggatgtgcgacaagtccatgattaagaaaaggtacatgcacttgaccgaagaaatcttgaaagaaaactcttccatgtgcgagtatatggctccatctttggatgctagacaagatatggttgttgttgaagttccaaagttgggtaaagaagctgctgctaaagctatcaaagaatggggtcaacctaagtccaagattacccatttggttttctgtactacctccggtgttgatatgccaggtgctgattatcaattgactaagttgttgggcttgaggtcatctgttaagagattcatgatgtaccaacaaggttgttttgctggtggtactgttttgagattggctaaagatttggccgaaaacaacaagggttctagagttttggttgtctgctctgaaattactgctgttacttttagaggtccatccgatactcatttggattctatggttggtcaagccttgtttggtgatggtgctgctgctgttatagttggtgctgatccagatacttctatcgaaagacctttgttccaaatcgtttctgctgctcaaactatcttgccagattctgatggtgctattgatggtcatttgagagaagttggtttgaccttccatttgttgaaagatgtcccaggcttgatctccaagaacattgaaaaatctttggttgaagccttcgccccaattggtattaacgattggaattccattttctggattgctcatccaggtggtccagctattttggatcaagttgaaatcaagttggatttgaaagaagagaagttgagagccaccagaaacgttttgtctgattacggtaatatgtcctctgcttgcgttttgttcattttggacgaaatgaggaacaagtccttggaagaaggtaaatctactactggtgaaggtttggaatggggtgttttgtttggttttggtccaggtttgactgttgaaactgttgtcttgcattctgttccagttgaacaaaccatctactcc

SEQ ID NO: 136 - DNA, 1158 bp, Artificial Sequence
  PKS58
atgaccatccaagactttcaatcttctggtaaggctactgttttggctgttggtactgctgttccaccaaaagaatttgatcaatctacctacccagacttcttcttcaatgttaccaactgcaacgaaaaggtcgagttgaagggtaaattccaaagaatctgtgacaggtccggtattaagaagagacatttctacttggacgaagagattttgaaggctaatccaggtatgtgtacttacatggaagctagcttggatgtcagacaagatattgctgttagagaagttccaaagttggctaaagaagctgctttgaaggctatcaaagaatggggtcaacctaagtctagaatcacccatttggttttcggtactacttctggtgttgatatgccaggtgctgatttccaattattgaagttgttgggtttgaggccaaacgttaagagagttatgttgtaccaacaaggttgttttgctggtgctactgttactagagttgctaaagatttggctgaaaacaatccaggtgctagagttttggttgcttgttctgaagttactgctgttacttttagagccccatctgaaactcatttggatggtttggttggttctgctttgtttggtgatggtgctgctgctttgattattggttcttcaccaactccagttgagaagcctttgtttgaagttcattggtctggtcaatgtgttttgccagattctgatggtgctattttgggtcatttgagagaagctggtttggttttccatttgttgaaagatgttccaggtatcatctccaagaacatcgaaaagttgttggctgaaccattggattacgttaagtctgttgatgaagctagtccagcttacactgatttgttttgggttgttcatccaggtggtccagctattttggatcaagttgaagctaaattgaagttggacaaggatagaatgcaagccactagagatgttttggctcaatacggtaatatgtcctctgcttctgttttgttcgttttggaccaaatgagaaagaggtccgtcgaattgaacaaagatacaactggtgatggtttgaagtggggtgttatgttgggttttggtccaggtttgactgttgaaactttgttgttgaagtctatt

SEQ ID NO: 137 - DNA, 1170 bp, Artificial Sequence
  PKS61
atggttaccgttgacgaaattagaagaacccaaagagctatgggtccagctactgttttggctattggtactgctaatccatctaactgctacgaccaatctatctacccagattacttcttcagagttactggttccgaacacaagatcgaattgaagaacaagttcaagagaatgtgcgacaagtccatgatcaagaagagatacttctacttgaccgaagaaatcttgaaaaagaacccaaacatctgcgagtacaatgctccatctttcaacatcagacaagaaatcaccattgccgaagttccaaagttgggtaaagaagctgctgaaaaggctattaacgaatggggtcaatccaagtctaagatcactcatttggttttctgtaccacctctggtgttgatttgccaggtgctgattatcaattgactaagttcttgggtttggagccatctgttaagagattcatgatgtaccaacaaggttgttatggtggtggtactgctttgagattggctaaagatttggctgaaaacaacaaggttgccagagttttggttgtttgttctgaattggctaacttggtttccttcagaaacccaaacgaaaccgaattggaagttttggttggtcaagccttgttttctgatggtgcttctgctgctattattggttctgatccaatcatgaacgtcgagaagccattattcgaattggttttcgctactcaaaccttgttgccagattctgaatatgctattactgcttacttgactgaagccggtttgaaggttcaaattcacaaagataccccaatgttgatctccaagaacatcgaaagaattttggtcgaagccttccaaccattggatatttctgattggaactccatcttctgggtttctcatccaggtggtccagctattttggatcaaattgaattgaagttgggcttgaagccagaaaagttgaaggctactagaaacgttttgtccgattacggtaatatggtttctgcttgcgttttgttcgttttggacgaaatgagaaagtcctctattaaggctggtttgggtactactggtgaaggtttggaatggggtgttttgttgggttttggtccaggtttgactattgaagccttggttttgagatccatttctatt

SEQ ID NO: 138 - protein, 406 aa, Artificial Sequence
  PKS8
MSSPHNAVLTGFTPVQLAKPVPQALTLELSAYAFARAYCIKNGVGTDDEAGFAKVYQSVKEKFDKYALSSAQIKRRQLIFFPKVSDIHFANGHVDIAAPEHAYLKLYDMATDPRGSDLKVRHESYAKVVDQGLERMFQDSAEAPDDLIHVTCSGYLSPSPVERMAADRGWFETTVTHSYHMGCYGAFPAIKMAHGMLSSSRFGVTPVKHRVDIVHTELLSAHNNIVDARAENIITMTLFADGLIKYSVLSEEELHRQGGHGLRVLAMNEHLLPDSADEMTWVPGSHQFLMTLTPMVPVVIKRHVRDFVVKLLERAGIDYERERLELTFAIHPGGPKIVEHIQEDLGLSDEQVAISKSVFLENGNMSSATIPHILKQVLEEVDVGTRVLCLGFGPGLTVTGMVLEKI

SEQ ID NO: 139 - protein, 398 aa, Artificial Sequence
  PKS10
MPGATTAAIVDSRRGTQHSEGPATILAIGTANPENIMFQDNFADYYFGLTKSEHLTELKEKMKRICHKSGIEKRYIHLDAELISVHPEIIDKHLPSLETRVDIVATEVPKLAESAARKAIAEWGRPATDITHLIFSTYSGCRAPSADLQLASLLGLRPSVSRTILSLHGCSGGGRALQLAKEIAENNRGARVLIACSELTLICFSTPDESKIIGHGLFGDGAGAVIVGADPSVDGECPLFEMVAASQTMIPGTEHALGMQATSSGIDFHLSIQVPTLIKDNIHQCLLNAFRSVGNTDPNWNDLFWAVHPGGRAILDNIEDKLQLHPCKLAASRQVLSEYGNMSGATIAFVLDELRRRREKEQDIQQQPEWGVLLAFGPGVTIESIVLRNPLSRGLKEN

SEQ ID NO: 140 - protein, 399 aa, Artificial Sequence
  PKS17
MPGAATTAAVVDSRRSAQRAEGPATIIAIGTANPANIVPQDNFADYYFGLTKSEHLTELKDKMKRICKKSGIEKRYIHLDEEIIRAHPEIIDKHQPSLEARVEIAAAEVPKLAESAARKAIAKWGRPATDITHLIFSTYSGCRAPSADLQLASLLGLRPSVSRTILSLHGCSGGGRALQLAKELAENNRGARVLVALSELTLVCFSTPDESKIVGHGLFGDGAGAIIVGAGPFSDGECPLFEMVAASQTMIPGTEHALGMQATSTGIDFHLSVQVPMLIKDNIQQSLLESFQSVGYTDPDWNNLFWAVHPGGRAILDNIEGKLQLQPWKLAASRQVLREFGNMSGATIAFVLDELCHRREKDEDESQQHEWGVMLAFGPGITIETIVMRNPLARGLKQN

SEQ ID NO: 141 - protein, 445 aa, Artificial Sequence
  PKS20
MAASTVAGELGLSITGLGVQYPPYSLGPDAIDILSKRYHPESPAMKKVLAINRYTGIDQRSSIGNPDHPLVNKPNPPTVKELHEVFMSDGVPLAVEASRKAMAEARLVPAQITHMVSTTCTDSANPGYDHYVAKELGLSDRLEKVLLHGIGCSGGLAALRTAANLCLGHTARGKPARILVLALEVSTTMVRSELESIDALQETRIGIALFSDCASAVILSNGIGEAPGKPAIYDLLGWENRVIPDSEHDLGFDVDPMGWKVVLSPRVPVLAKASLQPTYADLLSSLQDQLPSSYQKPADFDWAMHPGGATILSGAESAMGLTPEHMRASYDRYINHGNSSSATIFSVLNRLREKDMDALAPGGKVKEYVVGCAFGPGINVEMCMLKRRMNAPARTTTGLDTPPETDDSEGPGPGSSAGSDDGESIEGGEKEEKFINEALDNVELD

SEQ ID NO: 142 - protein, 402 aa, Artificial Sequence
  PKS22
MAPLIHGTSPPEIRNHSDDSLSKRAVSVVGTGAHYPPHELRSDELEKLISAFHDPNDPAVRKTLYVNEKSRIQTRRAAVPFDDPFWSDPKLPDIAECDVLFRKYGVPVAEEAARKALADWNGSFNDLTHVVVVTCTNTANPGLDYMICERLGLRKNVQRTLLHGVGCAGGAAALRTANELLLGAAFQGKPGRALVVACEICMIFFRSMLEDIVKAQEANVAMTLFGDGAGAMVLSNGICPKTSERAPLWNILNCRTTLLEDSASSIQFNIRPHGYDPVITKEVPGQTSAALPSGFQDLISSTPSLYSDKSNFDPSSYDWALHPGGYSIAVLAQNALGITEHHLRKTYEVYRSRGNTSSSTVISVINELAREQGTSESGRDKVIVAAFGPGITMELAVMARPA

SEQ ID NO: 143 - protein, 221 aa, Artificial Sequence
  PKS25
MVSVEEIRKAQRAEGPATVMAIGTATPPNCVDQSTYPDYYFRITNSEHMTELKEKFKRMCDKSMIKKRYMYLNEEILKENPSVCAYMAPSLDARQDMVVMEVPKLGKEAATKAIKEWGQPKSKITHLIFCTTSGVDMPGADYQLTKLLGLRPSVKRYMMYQQGCFAGGTVLRLAKDLAENNKGARVLVVCSEITAVTFRGPTDTHLDSLVGQALFGDGAAA

SEQ ID NO: 144 - protein, 398 aa, Artificial Sequence
  PKS26
MAATTTPTIEEIRKAQRASGPATVLAIGTATPSNCVSQADYPDYYFRITNSEHKTELKEKFKRMCEKSMIKKRYMHLTEEFLKENPNMCAYMATSLDARQDIVVVEVPKLGKEAASKAIKEWGQPKSKITHLIFCTTSGVDMPGADYQLTKLLGLRPSVKRFMMYQQGCFAGGTVLRLAKDLAENNKGARVLVVCSEITAVTFRGPSDTHLDSLVGQALFGDGAAAVIVGADPDTKIERPLYQLVSAAQTILPDSDGAIDGHLREVGLTFHLLKDVPGLISKNIEKSLVEAFTPIGINDWNSIFWIAHPGGPAILDQVEAKLGLKEEKMRATRHVLSEYGNMSSACVLFILDEMRKKSLKEGKATTGEGLDWGVLFGFGPGLTVETLVLHSVPIEPAH

SEQ ID NO: 145 - protein, 454 aa, Artificial Sequence
  PKS27
MVSVGEIRKSQRAEGPATVLAIGTATPANCVYQADYPDYYFRITNSEHMTELKEKFKRMCDKSMINKRYMHLNEEILKENPNVCAYMAPSLDARQDMVVVEVPKLGKEAAVKAIKEWGQPKSKITHLVFCTTSGVDMPGADYQLTKLLGLKPSVKRLMMYQQGCFAGGTVLRLAKDLAENNAGARVLVVCSEITAVTFRGPSDTHLDSLVGQALFGDGAAAIIIGADPDTKIERPLFELVSAAQTILPDSEGAIDGHLREVGLTFHLLKDVPGLISKNIEKSLVEAFKPIGISDWNSLFWIAHPGGPAILDQVELKLGLKEEKLRATRHVLSEYGNMSSACVLFILDEMRKKSIEEGKGTTGEGLEWGVLFGFGPGLTVETVGVAQPCYTIDSLSHSSGYNTEGKMGMAAGLGTGEDCMSSCANLRSYPSFLCYVLLYFYVLLCPCAFSPFTLK

SEQ ID NO: 146 - protein, 392 aa, Artificial Sequence
  PKS31
MAPTVQEIRKAQRAEGPATVLAIGTATPPNCVYQADYPDYYFRVTNSDHMTDLKEKFRRMCDKSQIEKRYMYLTEEILKEHPNMCEYMAPSLDSRQDMVVTEVPKLGKEAAQKAIKEWGQPKSKITHVIVCTTSGVDMPGADYQLTKLLGLRPSVKRFMMYQQGCFAGGTVLRMAKDLAENNRGARVLVVCSEITAVCFRGPTDTHLDSMVGQALFGDGAGAVIVGADPDLSVEKPIFELVWTSQTILPDSEGAIDGHLREVGLTFHLLKDVPGLISKNIEKSLTEAFSPLNIADWNSLFWIAHPGGPAILDQVEAKLGLKEEKLKATRQVLNDYGNMSSACVLFILDEMRKKSLENGHATTGEGLDWGVLFGFGPGLTVETVVLHSVPVAN

SEQ ID NO: 147 - protein, 409 aa, Artificial Sequence
  PKS33
MYNTYTYIHYYNYYMMASISVDQIRKAQRANGPATVLAIGTANPPTSFYQADYPDFYFRVTKNQHMTELKDKFKRICEKTTIKKRHLYLTEDRLNQHPNLLEYMAPSLNTRQDMLVVEIPKLGKEAAMKAIKEWGQPKSRITHLIFCSTNGVDMPGADYECAKLLGLSSSVKRVMLYQQGCHAGGSVLRIAKDLAENNKGARILTVNSEITIGIFHSPDETYFDGMVGQALFGDGASATIVGADPDKEIGERPIFEMVSAAQEFIPNSHGAVDGHLTESGLVYHIHKDVPGLISKNIEKSLVEALNPIGISDWNSLFWITHPGGPTILNAVEAELQLKKEKLEISRYVLSEYGNMSSSCVFFIMDELRKRSLKEGKSTTGDGFEWGVLFGFGPGLTVETLVLHSVAIKN

SEQ ID NO: 148 - protein, 404 aa, Artificial Sequence
  PKS47
MRHIIKTLYNITNMEEIKGVLKAKDVGCVATILAIGTANPLNCVNQDEFLHSYFKLTNNHNNTSFKELFTRICNNSMIKNRYMHLTEDILKENPNLCDYAAQSLNTRQDIKIKEIPKLAERAAMVAIKEWGKPISNLTHIIFHSSTGAADMPGADYQLVKSLGLNRSIKRIMLYNLGCFAGGTVLRVAKDLVENNLGASVLAVCAEITSADATFGRLSEDDKGRLVGHAIFGDGAAALVIGNADDPENKGLFQIVSTSQTILPNSEGCIEGHIREDGVTFTLSPRVPKLIGDNIETCLMEAFTPFKISDWNSLFWVVHPGGAAILREVESRVGLEQEKLRASWHVLREYGNISSASVLFILDEMRNKSLEEGRKTTGEGKNWGVLFGFGPGLTVETVVLHSIPI

SEQ ID NO: 149 - protein, 392 aa, Artificial Sequence
  PKS48
MASVEEIRNAQRAKGPATVLAIGTATPDNCLYQSDFADYYFRVTKSEHMTELKKKFNRICDKSMIKKRYSHLTEEMLEEHPNIGAYMAPSLNIRQEIITAEVPKLGKEAALKALKEWGQPKSKITHLVFCTTSGVEMPGADYKLANLLGLETSVRRVMLYHQGCYAGGTVLRTAKDLAENNAGARVLVVCSEITVVTFRGPSETALDSLVGQALFGDGSAAVIVGSDPNLSIERPLFQLVSAAQTFIPNTQGAIAGNLREVGLTFHLWPNVPTLISENIEKCLTQAFDPIGISDWNSLFWIAHPGGPAILDAVEAKLSLDKQKLKATRHVLSEYGNMSSACVLFIMDEMRKKSLKEEKTTTGEGLDWGVLFGFGPGLTIETVVLRSIPRDSN

SEQ ID NO: 150 - protein, 398 aa, Artificial Sequence
  PKS49
MTTGKVTLEAVRKAQRAEGPATVLAIGTATPANCVYQADYPDYYFRVTKSEHLTDLKEKFKRICHKSMIRKRYMHLTEDILEENPNMSSYWAPSLDARQDILIQEIPKLGAEAAEKALKEWGQPRSRITHLVFCTTSGVDMPGADYQLIKLLGLCPSVNRAMMYHQGCFAGGMVLRLAKDLAENNRGARVLIVCSEITVVTFRGPSESHLDSLVGQALFGDGAAAVIVGADPSEPAERPLFHLVSASQTILPDSEGAIEGHLREVGLTFHLQDRVPQLISMNIERLLEDAFAPLGISDWNSIFWVAHPGGPAILNMVEAKVGLDKARMCATRHILAEYGNMSSVCVLFILDEMRNRSAKDGHTTTGEGMEWGVLFGFGPGLTVETIVLHSVPITTVAA

SEQ ID NO: 151 - protein, 381 aa, Artificial Sequence
  PKS54
MARKPNGVANVLAIGTAVPPTSFPQSSYPEYFFRATKSTDKPEMMQKFQRICDRSGIKKRHFYLTSEILEKNPEICSYMGASLDARQEIGVREVPMLAKEAASAAIAEWGQPKSAITHLVLGTTSSIDMPGADFQLLKLLGLRPSVKRVMIYQQGCFAGGTVLRIAKDLAENNENARVLVACSEITAVTFRAPSDKHLDGLVGSALFGDGAAALIVGADPRPGIEKPLFEIHSAIQTVLPESDGAILGHLRECGLVFHLLKDVPGIIAKNLGKVLGGMLDRAGVASYNDLFWVVHPGGPAILDQMVARLQLDEEKMRATRQVLADFGNMSSSSVLFVLEEMRKGSTRAGMRSTGEGCDWGIMLCFGPGLTVEALLLKSTAV

SEQ ID NO: 152 - protein, 392 aa, Artificial Sequence
  PKS56
MKLENGQKIGRVHERAEGPAKILAIGTATPFHWVDQTSYPDYYFKVTNSEHLVDLKEKFRRICSRTMIRKRHMLLTEEILKKNPNLCSYNGPSLDIRQDILVSEIPKLGKEAALMAIDEWAQPKSKITHLVFCTRSGVDMPGADYQLIKLLGLSPSVQRLMMYQQGCFAGGTMLRLAKDLAENNKGARVLVVCAESSAIGFRGPSEAHPDNLIAQALFGDGAVAVIIGSDPKMGLERPIFEIVSAAQTFVPNGDCHLALHLREMGLTFHCTRDVPPTIAKNVESCLIKAFEPLGISDWNSVFWILHPGGNAIVDQVESTLGLEPDKLRATRNILREYGNLSSACVLFILDEIRKKSARYGLKTTGDGLDLGVLLSFGPGLTIETVVLRSVPI

SEQ ID NO: 153 - protein, 396 aa, Artificial Sequence
  PKS57
MAPSIEEIRKAQRASGPATILAIGKATPANCVSQADYPDYYFRITNSEHMTELKEKFKRMCDKSMIKKRYMHLTEEILKENSSMCEYMAPSLDARQDMVVVEVPKLGKEAAAKAIKEWGQPKSKITHLVFCTTSGVDMPGADYQLTKLLGLRSSVKRFMMYQQGCFAGGTVLRLAKDLAENNKGSRVLVVCSEITAVTFRGPSDTHLDSMVGQALFGDGAAAVIVGADPDTSIERPLFQIVSAAQTILPDSDGAIDGHLREVGLTFHLLKDVPGLISKNIEKSLVEAFAPIGINDWNSIFWIAHPGGPAILDQVEIKLDLKEEKLRATRNVLSDYGNMSSACVLFILDEMRNKSLEEGKSTTGEGLEWGVLFGFGPGLTVETVVLHSVPVEQTIYS

SEQ ID NO: 154 - protein, 386 aa, Artificial Sequence
  PKS58
MTIQDFQSSGKATVLAVGTAVPPKEFDQSTYPDFFFNVTNCNEKVELKGKFQRICDRSGIKKRHFYLDEEILKANPGMCTYMEASLDVRQDIAVREVPKLAKEAALKAIKEWGQPKSRITHLVFGTTSGVDMPGADFQLLKLLGLRPNVKRVMLYQQGCFAGATVTRVAKDLAENNPGARVLVACSEVTAVTFRAPSETHLDGLVGSALFGDGAAALIIGSSPTPVEKPLFEVHWSGQCVLPDSDGAILGHLREAGLVFHLLKDVPGIISKNIEKLLAEPLDYVKSVDEASPAYTDLFWVVHPGGPAILDQVEAKLKLDKDRMQATRDVLAQYGNMSSASVLFVLDQMRKRSVELNKDTTGDGLKWGVMLGFGPGLTVETLLLKSI

SEQ ID NO: 155 - protein, 390 aa, Artificial Sequence
  PKS61
MVTVDEIRRTQRAMGPATVLAIGTANPSNCYDQSIYPDYFFRVTGSEHKIELKNKFKRMCDKSMIKKRYFYLTEEILKKNPNICEYNAPSFNIRQEITIAEVPKLGKEAAEKAINEWGQSKSKITHLVFCTTSGVDLPGADYQLTKFLGLEPSVKRFMMYQQGCYGGGTALRLAKDLAENNKVARVLVVCSELANLVSFRNPNETELEVLVGQALFSDGASAAIIGSDPIMNVEKPLFELVFATQTLLPDSEYAITAYLTEAGLKVQIHKDTPMLISKNIERILVEAFQPLDISDWNSIFWVSHPGGPAILDQIELKLGLKPEKLKATRNVLSDYGNMVSACVLFVLDEMRKSSIKAGLGTTGEGLEWGVLLGFGPGLTIEALVLRSISI

SEQ ID NO: 156 - DNA, 1215 bp, Artificial Sequence
  PKS02
atggctccaccatctggtgaatctatttctgcttctgctgaagaacctattgccttgtctgttttgccaagaggtcaacctagagctgaaggtccagcttctgttttgggtattggtactgctgttccaccaactgaattcttgcaatctgaatacccagacttcttcttcgaagttaccaagtgttctgaaaaagaagccttgaaggctaagttcaagagaatctgtgataagtccggtatcagaaagaggtacttgttcttgaccaaagaagttttggaagccaatccaggtattgctacttatatggaaccatccttgaacgttagacacgatatcgttgttgttcaagttccaaaattggctgctgaagctgctgttaaggctatcaaagaatggggtggtagaaagtctgaaatcacccatatagttttcgctactacctctggtgttaatatgccaggtgctgatcatgctatggctaagttgttgggtttgaaacctactgttaagagggtcatgttgtaccaaactggttgttttggtggtgctactgttttgagagttgctaaagatttggccgagaacaacaagaatgctagagttttggctgtttgctctgaagttactgctgttacttatagagccccaaacgaaaatcatttggatggtttggttggttctgctttgtttggtgatggtgctgctgtttttgttgttggtgctgatccaaaaccagaagaaaagcctttgtttgaagttcattgggctggtgaaactatcttgccagaatctgatggtgctattgatggtcatttgactgaagctggtttgatcttccatttgatgaaggatgttccaggcttgatctctaagaacatcgaaaagtttttgtccgaagccagaaagtgtgttggttctccagattggaatgatatgttttgggctgttcatccaggtggtccagctattttggatcaagttgaagctaagttgaagttgtccaaggataagatgcaaggttccagagatgttttgtctgagttcggtaatatgtcctcctcttctgttttgttcgttttggaccaaatcagacagaggtctatgaagatgggtgcttctactactggtgaaggtaatgatttcggtttcttcattggttttggtcctggtttgactttggaagttttggtcttgagatctatgccaatcgtc

SEQ ID NO: 157 - DNA, 1107 bp, Artificial Sequence
  PKS03
atggctaacattgctaagattttggctattggtactgctaacccaccaaactacattttccaagctgattacccagacttctacttcaagatctctaactctgaacacatgaccgagttgaagaacaagttcagaaacatctgtcagaagtccaccatcaagaaaaggtacatgcatttgactggtgataccatcaagaagaacccaaacattggtatctacagaaccgcttctttggaagttccaaaattgggtcaagaagctgctttgaaggctatcaaagaatggggtcaatccatttccagaatcacccatttgattttctgtacctcttccggtatttctatgccaggtgctgattttgaattgaccaagttgttgggtttgccaccatctgttcaaagatccattatctaccaatctggttgttttgctggtgcccaatctttgagattggctaaagatattgccgaaaacaacgtcgaatccagaattttgatcgtctgctctgaatctatgaccacctgttttcatgttccatctgatgcccatttggatatcttggttggttctgctatttttggtgatggtgctgctgctttgatagttggtgctaatccagatccaactactgaacatcctttgttctctgttgtttctgctttccaaactaccattccagatactgaaaacggtatcgttgttcagactagagaaatgggtttgtcctactacttgtctagatctgttccaaagttgatctccgataacattccagaatgcttctcccaaatttccgcccaatttgaaatttccgattggaactctttgttctacatcgttcatccaggtggtccagctattttgaatggtattgaagaaaagttgggtttggtcaaagaaaagttgagagcctctagacatgttttgactgaatacggtaatatgtggtccccatctgtttttttcgttttggacgaaatgaggaagaggtcattgcaagaaggtaagattactactggtgagggtttgaagatgggtattttggttggttttggtccaggtttgactatggaaaatgttgtcttgcattctaccgctattgcc

SEQ ID NO: 158 - DNA, 1164 bp, Artificial Sequence
  PKS04
atggtgtccgttgaagaaattagaaaggctcaaagagctgaaggtccagctactgttatggctattggtactgctactccaccaaattgtgttgatcaatctacttacccagactactacttcagaatcaccaactctgatcacatgaacgaattgaaagaaaagttcaagaggatgtgcgacaagtccatgattaagaaaaggtacatgtacttgaacgaagaaatcttgaaagaaaacccatccgtttgcgcttatatggaaccatctttggatgctagacaagatatggttgttgttgaagttccaaagttgggtaaagaagctgctactaaggctatcaaagaatggggtcaacctaagtctaagatcacccatttgattttctgtaccacctctggtgttgatatgccaggtgctgattatcaattgactaagttgttgggtctaaggccatccgttaagagatatatgatgtaccaacaaggttgtttcgctggtggtactgttttgagattggctaaagatttggctgaaaacaacactggtgctagagttttggttgtttgctctgaaattactgccgttacttttagaggtccatctgatactcatttggattctttggttggtcaagccttgtttggtgatggtgctgctgctgttatagttggttctgatccattgccagctgaaaagccattatttgaattggtttggaccgcccaaactatcttgccagattctgaaggtgctattgatggtcatttgagagaagttggtttgaccttccatttgttgaaagatgtcccaggcttgatctccaagaatattcaaaaggctttggtcgaagcctttcaaccattgggtattgatgattacaactccattttctggattgctcatccaggtggtccagctattttggatcaagttgaagctaaattgggtttgaagccagaaaagatggaagctactagacacgttttgtctgaatacggtaatatgtcctctgcttgcgttttgttcatcttggatcaaatgagaaaaaagtccatcgagaacggtttgggtactactggtgaaggtttggaatggggtgttttgtttggttttggtccaggtttgactgttgaaaccgttgttttgagatctgttaccgtc

SEQ ID NO: 159 - DNA, 1155 bp, Artificial Sequence
  PKS05
atgaacaagggtagatctgctgaaggtccagctgttattttgtctattggtactgctgttccaccatacgttcacgaaatgggttcttatgctgattactacttcgacgaaactaactgcaatcacaagccagaattgaaggctaagttcaagagaatctgcgataagatgcacatctccaagagacatatggttgtcagaaaagagttgttggctcaatatccatctttgggcacttacttgaacaattccttggaagatagacacaaggtctgtatggaatgggttccaaaattggctgttgaagctgctgaaaacgctatcaaagaatggggtggttctttgtctcaaatcacccatatagttatggctaccacctctgttgttaatatgccaggtgttgatttgttggttgctaaggctttgggtttgtctccaaaattgagaagagtcatgatgtaccaaactggttgttggggtggtgctgctattattagagttgctaaagatatcgccgagaacaacaaaggtgctagagttttggttgttgcttctgaatgtactgctactttttttagagccccatccgaagaatatttggatggtttggttggtcaagccttgtttggtgatggtgctggtgctttggttattggtgctgatccaaatccagatactgaaagaaccttgtacgaaatccaatggtctggtgaaatggttgttccagattctgaaggtgctattgatggtcatatgatggaagctggtatgtactaccatttgaagccagatattccaaagttggtgtccagatccattgaagaatttgtttctgatgctactgctcaagctggtaatgctgatgttaatgatttgttctgggctgttcatccaggtggtgttgctattttgaaccagatcgaaaatcaattgatgttgtccccagaaaagttgttggcctctagagaaattttggctgattacggtaatatggcttctgcttgtgttttgttcgttttggatcaagtcagaaactgctccattaaggctaaggcttctactactggtgaaggtagagatttcggttccttgattggtattggtccaggtttgactatggaatgttgtgttttgaagtccgttccattggacaac

SEQ ID NO: 160 - DNA, 1212 bp, Artificial Sequence
  PKS06
atgggttcttctgctgctccagctaatgttagagaaatatgtagagcacaaagagctgacggtccagctgctgttttggctattggtactgctaatccagctaattgtgttccacaagatgaattcccagacttctactttagagctaccaagtctgatcatttgaccggtttgaaagaaaagttcaagagagtctgtcaaaagttgggtgtccaaaagagatacttgcatcatactgaagagttgttgtctgctcatccagaattcttggatcattcttctccatctttggatgccagattggatattgtcaaaactgctgttccagaattggctgctcaagctagtagaaaagctattgctgaatggggtagaccagctgctgatattactcatttggttgttactaccaactccggtgctcatattccaggtgttgattttagattggttcctttgttgggtttgaggccaactgttagaagaactatgttgtacttgaacggttgttttgctggtgctgctgctttgagattggctagagatttggctgaaaacaattctggtgctagagttttggttgtttgcgctgaaattaccgtcttgttgtttaatggtccagaagaaggttgtttccagaccttggttaatcaaggtttgtttggtgatggtgctggtgctgttatagttggtgctgatccattggctgctgaaagaccattatttgaaatagtttctgctgcccaagccatcattccagaatctgaagatgttatcactatgcacttgactagaggtggttacggtggtaatatttctactagacaagttccagttttgatcggtgacaacattgaaagatgtttgactgatgcttttgctccattgggtggtgttattggtgctgaatggaatgatttgttctgggatgttcatccaggttcctctgctattttggatcaagttgatgctgtcttgaagttgaagccagaaaaattggctgcttccagaagagttttgtccgaatacggtaatatgttcggtgttaccgttatcttcgttttggacgaattgagaagaagaatggaaaaaggcgaagaagagggtgctccagaatggggtgttatggttgcttttggtccaggtttgactgttgaaactatggtcttgcatagatctggtactccagctgaaaaaaagttggctgaagct

SEQ ID NO: 161 - DNA, 1191 bp, Artificial Sequence
  PKS07
atgaccccatccattgaagaaattagaaatgctcaaagagctgacggtccagctactgttttggctattggtactgctactccagctcattgtgttttacaatctgattacccagactactacttcagagttaccaactctgaacatatgaccgacttgaaagaaaagttcaagagaatgtgcgacaagtcctacatcaagaaaaggtacatgcatttgaccgaagaaattttgaaagaaaacccaaagatgtgcgactactggtcaccatctttggatgctagacaagatatcgttgttgtcgaaattccaaagttgggtaaagaagctgctgttaaggctatcaaagaatggggtcaacctaagtctaagatcacccatttggttttctgtactacctctggtgttgatatgccaggtgctgattatcaattgactaagttgttgggtttaaggccacacgttaagagattgatgatgtaccaacaaggttgttttgctggtggtactgttttgagattggctaaagatttggccgaaaacaatagaggtgctagagttttggttgtctgctctgaaattactgctgttacttttagaggtccatccgaaactcatttggattctatggttggtcaagccttgtttggtgatggtgctgctgctgttatagttggtgctgatccagatccagttttggaaaaacctttgttccaattggtttccgcctctcaaactattttgccagattctgaaggtgccattgatggtcatttgagagaagttggtttgaccttccatttgttgaaagatgtcccaggcttgatctccaagaacattgaaaaatctttggtcgaagccttcaagccaattggtatttctgaatggaattccttgttctggattgctcatccaggtggtccagctattttggatcaagttgaagctaagttggccttgaaagaagaaaagttgagatccaccagacaggttttgtctgattacggtaatatgtcctctgcttgcgttttgttcattttggacgaaatgagaaagaagtccgttgaagaaggtaaattgactactggtgaaggtttggaatggggtgttttgtttggttttggtccaggtttgactgttgaaactgttgtcttgcattctttgccaactactcaacaagctgtttctgct

SEQ ID NO: 162 - DNA, 1182 bp, Artificial Sequence
  PKS09
atggctgcttctgttgaagaaatctgtaaagctcaaagagcacaaggtccagctactattttggctattggtactgctactccaccaaactatatctaccaagctgattacccagacttctacttcagagttactaagtctcaacacatgaccgaattgaaggacaagttcaaaagaatgtgcgacaagtccatgatcaagaagagacatttcgtcatcaacgaagaaatcttgaaagaaaacccaaacgtctgcgtttatgaagctccatctttggatgttagacaagatatcgttgttgtcgaagttccaaagttgggtaaagaagctgctactaaggctattaaggattggggtcaacctaagtctaagatcactcatttggttttctgtaccacctctggtgttgatatgccaggtgctgattatcaatgtgctaagttgttgggtttaaggccatccgttaatagagtcatgttgtaccaacaaggttgttatgctggtggtactgttttgagagttgctaaagatttggccgaaaacaacaaaggtgctagagttttggttgtctgctctgaaattactgccattacttttagaggtccaaccgatacttacttggattctatggttggtcaagccttgtttggtgatggtgctggtgctatgattattggtgctgatccagatacctctatcgaaagaccattattccaattggtttctgctgcccaaactatcttgccagattctgaaggtgctattgatggtcatttgagagaaatgggtttgaccttccatttgttgaaagatgtcccaggcttgatctccaagaatatcgaaaattctttggtcgaagccttcaccccaattggtattaacgattggaattccattttctggattgctcatccaggtggtccagctattttggatcaagttgctgaaaagttgagattgaaagaagagaagttgaaggccaccagacatgttttgtctgaatacggtaatatgtcctctgcctgcgttattttcattttggacgaaatgagaagaaagtccttgaaagagggtaaagctactactggtgaaggtttggattggggtgttttgtttggttttggtccaggtttgactgttgaaactgttgtcttgcattctgtttctgctttgtctgctcat

SEQ ID NO: 163 - DNA, 1194 bp, Artificial Sequence
  PKS11
atggcctcctctattgatattgcccaaattagaaatgcccaaagagcacaaggtccagctactattttggctattggtactgctactccatctaactgtgtttaccaagctgattacccagactactacttcagaattaccaagtccgaacacatggtcgacttgaaagaaaagttccaaagaatgtgcgacaagtccatgatcagaaaaaggtacatgcatttgaccgaagaatttttgaaagaaaacccaaacttgtgcgagtacatggctccatctttggatgctagacaagatgttgttgttgttgaagttccaaagttgggtaaagaagctgctactaaggctatcaaagaatggggtcaacctaagtctaagatcacccatttgattttctgtaccacctctggtgttgatatgccaggtgctgattatcaattgactaagttgttgggtctaaggccatctgttaagagattcatgatgtaccaacaaggttgttttgctggtggtactgttttgagattggctaaagatttggccgaaaacaacaaaggtgctagagttttggttgtctgctctgaaattactgctgttacttttagaggtccaaacgatacccatttggattctttggttggtcaagccttgtttggtgatggtgctgctgctgttatagttggttctgatccagatttgaccatcgaaagacctttgttcgaaatggtttctgctgctcaaactatcttgccagattctgaaggtgctattgatggtcatttgagagaagttggtttgaccttccatttgttgaaagatgtcccaggcttgatctccaagaatattgaaaaggctttgacccaagccttttccccattgggtattactgattggaattccattttctggattgctcatccaggtggtccagctattttggatcaagttgaattgaagttgggtttgaaagaagaaaagatgagagccaccagacacgttttgtctgaatatggtaatatgtcctctgcctgcgttttgttcattatcgacgaaatgagaaaaaagtccgctgaagatggtgctgcaactactggtgaaggtttggattggggtgttttgtttggttttggtccaggtttgactgttgaaactgttgtcttgcattctttgccaactactatgccaattccaacc

SEQ ID NO: 164 - DNA, 1086 bp, Artificial Sequence
  PKS12
atgcaagctgattacccagactactacttcagaattaccaagtctgaacacatgaccgaattgaaagaaaagttcaagagaatgtgcgacaagtccaacatcagaaaaaggtacatgcacttgaacgaagaaatcttgaaagaaaacccagctatgtgtgagtatatggctccatctttggatgctagacaagatatggttgttgttgaagttccaatcttgggtaaagaagctgctactaaggctatcaaagaatggggtcaacctaagtctaagatcacccatttggttttctgtactacctctggtgttgatatgccaggtgctgattatcaattgactaagttgttgggtctaaggccatctgttaagagattgatgatgtaccaacaaggttgttttgctggtggtactgttttgagattggctaaagatttggctgaaaacaatgctggtgctagagttttggttgtttgctctgaaattactgccgttacttttagaggtccatctgatactcatttggattctttggttggtcaagccttgtttggtgatggtgctgctgctgttatagttggtgctgatccagatttgaaagtcgaaagacctttgttcgaattggtttctgctggtcaaactatcttgccagattctgatggtgctattgatggtcatttgagagaagttggtttgaccttccatttgttgaaagatgtcccaggcttgatctccaagaacattgaaaaatctttgaacgaggccttctccccaattggtatttctgattggaattccttgttctggattgctcatccaggtggtccagctattttggatcaagttgaaatcaagttgggcttgaagcaagagaagttgaagtctactagacacgtcttgtctgaatacggtaatatgtcatctgcttgcgtcttgttcatcttggatgacatgagaaaaaagtccatggaagagggtaaatctacttacggtgaaggtttggaatggggtgttttgtttggttttggtccaggtttgactgttgaaactgttgtcttgcattctgttccaactgttgctactcaa

SEQ ID NO: 165 - DNA, 1185 bp, Artificial Sequence
  PKS13
atggcttctgttaccatggaacaaattagaaaggctcaaagagctgaaggtccagctactattttggctattggtactgcttgtccaccaaactttgttactcaagctgatttcccagactactacttcagagttactaagtctgaacatatgaccgccttgaagaacaagttccaaagaatttgtgacaagaccatgatcaagaagaggcacttgtatttgaccgaagaacacttgaagcaaaacccaaacatgtgtgaatattccgctccatctttagataccagacaagatatgttggttgtcgaagttccaaagttgggtagagaagctgctatgaatgctatcaaagaatgggatcaacctaagtccaagatcacccatttgattttctgtactacctccggtgttgatatgccaggtgctgattatcaatgtgctaagttgttgggtttgtccccatctgttaagagattgatgttgtaccaacaaggttgttttggtggtggtactgttttgagattggctaaagatattgccgagaacaacaaaggtgctagagttttggctgtttgctctgaaattatgaccacctctattttccatggtccaaccgaatctcatttcgattctatggttgttcaagccttgtttggtgatggtgcttctgctttggttgttggtgctgaaccagatgaatctgttggtgaaagaccaatcttcgaattggtttctgctgctcaaactatcatgccagattctgatggtgctattggtggtcatttgaaagaatctggtttgatgttgcacttgatcagagatgtcccaaagttgatctctaacaacatcgagaagaacttgatcgaagccttcagagaaattggtatcagagattggaactccattttctggattgctcatccaggtggtagagctattttggatgaagttgaagctaagttgagattgaagaaagaaaagatggccgattccagacacgttttgtctgaatttggtaacatgtcctctgcttgcgttttcttcattatggacgaattgagaaagagatccttggaagaaggtaaatctactactggtgatggtttggaatggggtgttttgtttggttttggtccaggtgttactgttgaaactgttgtcttgcattctgttgccaacaaggtt

SEQ ID NO: 166 - DNA, 1050 bp, Artificial Sequence
  PKS14
atggttatggctgctggtgcttcttcattggacgaaattagaaaagctcaaagagctgacggtccagctggtattttggctattggtactgctaatccagaaaaccatgttctacaagctgaatacccagactactacttcagaattaccaactctgaacacatgaccgacttgaaagaaaagttcaagagaatgtgcgacaagtccatgatcagaaaaagacatatgcacttgaccgaagattttttgaaagaaaacccacatatgtgcgcttacatggctccatctttagatacaagacaagatatcgttgttgtcgaggttccaaagttgggtaaagaagctgctgttaaggctatcaaagaatggggtcaacctaagtctaagatcacccatgttgttttctgtactacctctggtgttgatatgccaggtgctgattatcaattgactaagttgttgggtctaaggccatctgttaagagattgatgatgtaccaacaaggttgttttgctggtggtactgttttgagaattgctaaagatttggccgaaaacaacagaggtgctagagttttggttgtttgctctgaaattactgccgttacttttagaggtccatctgatactcatttggattctttggttggtcaagccttgttttctgatggtgctgctgctttgatagttggttctgatccagatacttctgttggtgaaaagccaatcttcgaaatggtttctgctgctcaaactatcttgccagattcagatggtgctattgatggtcatttgagagaagttggtttgaccttccatttgttgaaagatgtcccaggcttgatctctaagaacatcgttaagtctttggacgaagcctttaagccattgggtatttctgattggaattccttgttctggattgctcatccaggtggtccagctattttggatcaagttgaattgaagttgggtttgaaagaagaaaagatgagaatgaccagacacgtcttgtctgaatacggtaatatgtcatctgcttgcgtcttg

SEQ ID NO: 167 - DNA, 1203 bp, Artificial Sequence
  PKS15
atggctggtgctactgttactgttgatgaagttagaaaaggtcaaagagctactggtccagctactgttttggctattggtactgctactccagctaattgtgtttaccaagctgattacccagactactacttcagaattaccaagtctgatcacttgaccgacttgaaagaaaagttcaagagaatgtgcgacaagtccatgatcagaaaaaggtacatgcatttgaccgaagagttcttgtctgaaaacccatctatgtgtgcttatatggctccatctttggatgctagacaagatgttgttgttaccgaagttccaaaattgggtaaagctgctgctcaaaaggctatcaaagaatggggtcaacctaagtctagaatcacccatttggttttctgtactacctctggtgttgatatgccaggtgctgattatcaattgactaaggctttgggtttaaggccatccgttaatagattgatgatgtaccaacaaggttgtttcgctggtggtactgttttgagagttgctaaagatttggccgaaaacaatagaggtgctagagttttggttgtctgctctgaaattactgctgttacttttagaggtccatccgaatctcatttggattctttggttggtcaagccttgtttggtgatggtgctgctgcagttgttgttggtgctgatccagatggtagagttgaaagaccattattccaattggtttccgctgctcaaactatcttgccagattctgaaggtgctattgatggtcatttgagagaagttggtttgaccttccatttgttgaaagatgtcccaggcttgatctccaagaatattgaaagggctttggaagatgctttcgaaccattgggtatttctgattggaactccattttttgggttgctcatccaggtggtccagctattttggatcaagttgaagctagagttggtttggataaggctagaatgagagctactagacacgttttgtctgaatacggtaatatgtcctctgcttgcgttttgttcattttggacgaaatgagaaaaagatccgccgaagatggtcaagctactactggtgaaggtttggattggggtgttttgtttggttttggtccaggtttgactgttgaaactgttgtcttgcattctgttccaattactactggtgctccaactgctgct

SEQ ID NO: 168 - DNA, 1347 bp, Artificial Sequence
  PKS16
atggcagcaagtacggcacctggagaattgggactttccatcacaggcttgggggttcagtacccgccttacagcctgggtccggactgcttggatattctttccaagcgttattatcctgagtccccggccatgaagaaagtcttagcaatcaatcgctataccgggattgaccaacgcagctcgatcggcaacccagatcatcccttagtcaatcaacccaattccccgaccgtggatgagcttcacaaagtgttcatgtccgacggggttccattggctgtggaagcgtcccgcaaagcgatggcagaagcgcgcgtagaacctaaccaaattacacatatggtttcaacgacatgcactgattcagctaatcccggctatgaccacttcgtggcaaaggaattaggcttgtcggaccgcttggaaaaagtgttattgcatggcatcgggtgtagcggtggacttgctgctttacgcacggctgccaatttatgtttaggccacaaagcgcgtggtaaacccgctcgtattttggttttagcacttgaggtctcgacaattatggttcgctcggaactggaatcgattaatgctctgcaggagactcgcatcggcattgcgttattctctgactgcgcttctgctgtggtcttatcgaatggcatcggagaggagcctggcaagcccgcaatttatgatttacttggctgggaaaatcgtgtaatcccagacagtgaacatgatttgggcttcgatgtcgatcccatgggctggaaggtcgtgttaagtccgcgcgtcccagtccttgctaaagccagtttacaaccgacctacaccgacctgcttagcagtttccaggaccagttacccagctcataccagaagccagccgactttgattgggctatgcaccccggtggagccacgatccttagcggcgcagagtcagccatgggcttaacaccagaacacatgcgtgcaagttacgatacatatatcaaccacggcaactcgagttcagccacgatcttctcggtattaaatcgcctgcgcgaaaaagacatggacgccttagcgccggacggcaaagtgaaggaatatattgtgggttgtgcttttgggcccggaatcaatgtagagatgtgtatgttgaaacgtcgtatgaattgcccaaccacgacgactacggggttggacacaccaccggagaccgatgattctgaggggcctgggccaggatcgtctgctggctccgaggatggtgaatcgatcgagggggacaaggaagacaagaaagaaaagtttatttccgaggccttggacaacgtggaactggattgatga

SEQ ID NO: 169 - DNA, 1056 bp, Artificial Sequence
  PKS18
atgaacgaagtgcgcatcgtttcaaccacaaaagtactgcccccgtattgccgtgacacaaaagacatcttgccattcgtggatttctggttgagtggacaagaggagcgttttcgtcgcaaggtaatcaaaattttcgagggcgcgggagtcgaacgccgttatggtattatggacattgaagaagtcttcacggctacctcatttgaagaaaaaaacgcgatctatgttcgtgaagtaaagaaacttggtaagtcggtgctgcagaaagccttaaagcagagcggatggcaaccagaatctttagactatattatcaccgtttcttgtaccggaattatgattccgtcactggatgcgtaccttgtgaacgacatgggacttaaacaggaaatcgtgcgtctgccagttacagaaatgggctgtgccgccggcatcagcggacttatctatgctcataatttccttaaatctaaccctggcaaacgcttagctttgattgcagtcgagtctccaaccgcgacatttcaattgaatgacttctctatggcgaacatggtgagtgcggccattttcggtgacggcgctgcctgtgtcttgttaagttccgaagaaaatgctccggggcctaaaatccttggtgaaggcatgtatcatttcaaagaggccacgcatctgatgggttttgacttgactaacaccggtttaaagatgattttagatcccagtgtacccgagactattgccgaccactttcctcgtattatccatccattccttgaaaagcatggcacatctatcgagtccgtggatcacctgatctttcacccgggaggacgtaagattgtgcagaccgttgaagaacttttcggccagttgggcaaaaatatcgacgacacgcgcgaggtgctgcgtaagtatggtaatatgagtagtgcgacggttctgtatgtccttgaacgtttcttggaacgcgaaattcaacaaggacaacaaggactgttgttgagcttcgggccgggtttcagtgcccagcgcgttttacttgaatggtga

SEQ ID NO: 170 - DNA, 1245 bp, Artificial Sequence
  PKS19
atgtcctcggccgcagttgcgatgcttgctgaccctactgtacagattgcattggcttgtctggttgtatcactgttcgttgttttgcaatcagtcaagaagtcaaaggatgaacagactgtataccccgtcatcgcgggaatggcaattggcaatccgcaatatcgctgtactcagaatgaggcactggccgttgcgtccaaatgccccggcttggagtcgatcaaaccagttttggagcgcatctacggtaattcacgtatcggatcgcgttacttcgccgtcccggatttcaccccaggtcgtgctgctaaaggtgatcccctgttctacccagcggatggaagctaccaagtccccgtcgatgttcgcctggacaagtttaaggagaaggctgttccgttagtcagcgatgtagcgcgccgtgccatcaaggaagcaggtttgaatgtggaggacattagcaagctggtcgtcgtatcctctaccggattcttgggccccggccttgactgtgagttgatcaagaatttaggactgacccgcagtgtggatcgcacactgattggatttatgggttgcgcggccgcaatgaacgggttccgtaacgcaaatgattacgttacggcgaacccaggcaaatacgctctgatgatttgcgtagaactttcaagtgtccatactacgtttgatgataacatcaacgatgcaatcttgcatgccatcttcgctgatggatgcgcggccgccgttttgaagggggcgcgtaagtccgaatgccccaaagggacccttgctatcgtcgataaccatgcctggctgatggaaggtacagaagacggtattacgcttgcgatcaaacctaatggaatcacttgtactctgtcaaagttcctgccacagtacattgcgaaaaatattgccttcttcgccgacgggtttttgaagaagcacaaactgggtcgcgatgatgtcgatttttggtgcgtccatcccgggggtcgtcgtattattgaggaagcccagaacggattagggcttagtgaggagcaaacagcagacagctgggcagtcttaggcgaatatggtaacatgttgagcccttcggtcatgttcgttctttctcgcgtatttaagcgtcacaatgctgcacttgcacaggggaaaccgggttaccaaactggaatggcatttagcttcagtcctggtgttggtgcggagggaattttgcttcgccaaatctga

SEQ ID NO: 171 - DNA, 1056 bp, Artificial Sequence
  PKS21
atggcggttctgtgtaaaccggcgatcgcagttcccgaccacattattaccaatgaagaaacccttgagttagcgcgccgcctgcattccgatcacccgcaattagcattagcatgtcgccttattgagcataccggagtacgtaagcgccacttgatccagcctattgatgaagtgttaaaacaccccggattggacgctcgtagtgcaacctatgagaccgaatccaaggcacgcgttccatcagttgtgcgccgcgcgttggaccaagccgaattggaacccgaccagattgacttaatcatttacgtgagctgcacaggttttatgatgccatctcttgcttcttggttggttaacacgatgggcttccgcgctgacacgcgccagcttcctattgctcagttaggatgcgcggcgggtggagcagcggttaatcgtgctcacgatttttgcaccgcctatcccggcacgaatgttctgatcgtggcatgtgaattctgttcattgtgctatcaaccgactgacttggggattgggtcgctgttgagcaacggtttattcggggacggcattgctgctgctgtagttcgtggagaagagggaacgggcatgcgcttggagcgtaacggtacctacttgattccgcataccgaggaatggatcagctacgccgtacgctccacggggtttcactttcagcttgacaagcgtgtgccaggaactatggaaccgctttcaccggcattgcgtgccctggccgaacagcaccaatggaacgccgggaaacttgacttctacatcatccacgcaggtgggccgcgcattcttgacgacttaagtcgttttttggatgtgccacccggcgcattccgccacagccgcgctaccctgactgagtatgggaacattgcgtcggccgtggtgctggatgctcttggccgcttattcgacgagcaatccgcgttggatggacatcacgggatgttggcgggatttggccctgggatcattgccgagatgagtcttgggacgtgggtgagtccagaaagctga

SEQ ID NO: 172 - DNA, 1068 bp, Artificial Sequence
  PKS23
atgccacgtttgtgtaaaccgtcggtgcgcgtccccgagtacgttattacagcagaagagactcttgatttcgccgaacgcgtgcatgctgggaaaccacaactgcctttagctctgcgcttgatccgtaataccggcgtgcaaaaacgccatattgtccaacccatcgagcagacgttaaagcatcccggtttaaccgaacgtaaccgcatttacgaggcggaaagtaaaaagcgtaccccggaggtagtggaggaggctctttccaatgctggtgtcacagcgcgcgatattgatgcgatcatttatgtgagctgcactggatttctgatgccctcactgaccgcctggcttatcaatcagttagggttccgctctgatactcgtcaaatcccaattgcccagcttggatgtgcggccgggggcgcagctattaatcgtgcacacgacttttgcttggcccaccctggttcaaatgttctgatcgtaagttgtgagttgtgctctttatgttatcaacctgacatggacgatattggtagcttgctttccgacggtctgtttggagacgccgtggcggcagccgtagttcgcggtatcggtgggacaggtattgagttagaagccaatagttcatatttaattcctcacaccgaggattggatttcatacgctgtccgcgataccggcttccacttccaacttgatcgtcgtgtcccggggactatggagcctctggcgccagtccttcgtgaatttgcggctgggcatcgttgggacgcgtcaaacttagatttctacattgtccatgccggtggtccccgcatccttaatgaccttgcaaagttcctggatgtcgaccgtaaggtattccgccacagctgggccacgttaactgaatatgggaacatcgcatcagctgttgtactggatgccgccttgcgcttattcgaagaagacacccccatgccagatgccactggtcttatcgcaggttttggccctgggatcaccgcagagatggcgcttggacgttggtcttcggatacgccacctgccacaggctga

SEQ ID NO: 173 - DNA, 1062 bp, Artificial Sequence
  PKS24
atgagcgtcatcgccggggtcttcggagcgttgcctccgcaccgctatagccaatcagagatcacagatagtttcgttgaattcccgggactgaaagaacacgaagaaatcattcgccgcctgcacgccgcagcaaaagtgaatggacgccatctggtgcttcccctgcagcaataccccagtcttacagactttggtgatgcaaatgagattttcattgaaaaagcagttgatctgggggtggaggcgctgttgggggctttagacgatgccaatttgcgtccttcggatattgatatgatcgcaacagctactgttacaggggttgccgtcccatccttggacgctcgtatcgccggccgccttgggttacgcccagatgtccgtcgcatgccccttttcggcttggggtgcgttgccggcgctgctggtgtcgcacgtcttcgtgattatttacgcggtgcacccgacgatgtcgctgtgttagtgagcgtcgagctttgcagtctgacctaccctgctgtgaagccgactgtatctagcctggtcggtacagcccttttcggcgatggggccgcagcagttgtcgctgtaggagaccgtcgtgccgagcaggtacgcgcgggcggccccgacatccttgactcccgttcttcgttatatccggactcactgcacatcatgggatgggacattggcagccatggtcttcgtctgcgtctgagtccagatctgacaaatcttgtcgaacgctacttagcgaatgacgtcacaaatttcctggatgcacaccgcttgacaaaggacgatattggagcttgggtttcacaccccggcggcccgaaagtgattgacgctgtagcgaaatcacttgctttaccacccgaggctctggagttgacctggcgcagcttaggtgaaatcgggaacctgtcttctgcctcaatcctgcatattttgcgtgacacgaacgagaaacgcccgccatcaggtagtgcgggactgatgctggctatgggcccagggttttgcaccgaactggtgctgcttcgttggcgctga

SEQ ID NO: 174 - DNA, 1098 bp, Artificial Sequence
  PKS28
atggcagtgctgtgtcgcccagcagtggcggtaccgcctcacgtcatcacgatggaggaaactttggatttagctcgttccacgcatgccggtcatgatcagttgggtctggtccttcgtttaattcgcaatacaggagtagccactcgtcacttggtacaacccattggtgagaccctggcccatccggggttcgaagcgcgcaacaaagtctacgaacgcgaggcgaaagcccgtgtgccacaagtagtccatcaagccttagccgaagctgaattgacagcgcaggatattgacttaatcgtatatgttagctgcaccggttttatgatgcccagcatgacggcatggatgattaactcccttggattccgctcggacactcgccaacttcccatcgcccaacttggttgcgcagcgggaggggccgcagtgaatcgcgcacatgacttcacacgcgcatatcccggctcaaatgtattaattgtggcctgtgaattttgttcgttattatatcaaccgacggatttgggggtaggttctttattatctaatggccttttcggggacgctgtggccgcagtcgtggtccgtggggaaggaggaacggggctgagtcttgagcgcaacggcagccacttagtgccggatacggaagagtggatttcctatgcagttcgtgaaactggctttcactttcaacttgataaacgcgtccctggcacaatgagtatgttggcccccgcattgacagccttgtcggctcagcactcctggaatgtaggggaactggacttctatatcatccacgctggggggccccgtattcttgatgacctttgtactcaccttgaactgccgtccgaaatgtttgcgcagtctcgtgccactttaactgaacgtggaaacatcgcaagctgtgtcgtcttagatgccctggatcgctattttgcaagcgggaaggcgactgagggtgctcgtggcatgttagctggattcggacctggcattacagcggaaatttcgctgggaacgtgggctacaggagaagggcgccctgctgcattaacaggtgcggaggcccgccgccctgcatga

SEQ ID NO: 175 - DNA, 1047 bp, Artificial Sequence
  PKS29
atggccacgttgtgccgtccggcggtagcggttcctgaccacgttatcacgcgtgaagagacgttgcaactggcacgcgaactgcacgcaggccatccgcaattagatctggtgcttcgtttgatcgaaaataccggcgttcgtacccgtcatcttgtgcaaccgcttggagaaacattacgtcacccaggcttcgaagaacgtaaccgcgtatatgaggccgaggctaaagcgcgtgttccccgcgtagtcgatcgcgcgttagctcaagcagaggtggtcccggacgacattgacctgatcgtctacgtaagctgtaccggattcatgatgccttcgttaactgcataccttatcaatagcatgcacttccgtcccgaaacccgccagcttcccattgctcaactgggttgcgcagcagggggtgctgccatcaaccgtgcacatgatttctgtactgcgtaccccggatccaacgtgttaattgtttcgtgtgagttttgctctttatgctaccagcccacagacctggcagtaggctcattgctgtccaatgggctgtttggcgacgcagtttctgcagtggtaattcgtggggaaggcggcatcgggatgaatatcgagcgcaactctagccatctggtccccgatacggaggactggatctcatacgcagtacgcgagacagggttccatttcttgctggataagcgcgtacccggcacgatgcgtatgttagcgccagcggttcacgcactggtgcagcatcacgaatgggatgtaaccggcttagatttcgccatcgtgcatgcggggggtccccgcattcttgacgacttatctcattacttaggcctggcgggagaaatgttccgtttttctcgtgcgacgttaacggagcgtggaaatatcgcgagctcggttgtcttcgatgccttagaccgcatgttcgcagaaggtacggctgttgatacagcacgcggacttgttgcgggttttggccctggcatcacagccgaaatcgcagtaggtcgctggcatacttga

SEQ ID NO: 176 - DNA, 1161 bp, Artificial Sequence
  PKS30
atggagatcggagcgggccgcgccgcgattattggtatcggcacagctttaccaccgtttcgtatggaccaaggagaaacagccgcgcgcatcgctgaagcactgcaagagcaccctgatagtatgcgttgggccaagcgtatcttcaagcaatgtggtgtagacagtcgttatacctgtttaccggaacttttagaaccggcggcgggctgccgttattctcctggaacgccagcggacgctgtgcctaccacggcggaacgcatggccgtttatcgccgtgaggcagtaccacttgggttggaggcagctcgctccgcccttgcagatgccggggttgaacccgccgggattactcatctgatcacggtcagttgcacgggacaattccttccagggctggatgcggtcattactgaatctttggggttaagccgccgtgtgcaacgtatcccattcaacttcttgggttgtgccgccggtcttaaaggagtctgtctggcgcaacaccttattcgcctggactcagcggcgcgcgtgctggtggtctgcgtggaattgtgcacccttcacatgcagtcatccgctaagcgcgaggacttatacgccgcctctttttttggggacggtgccagcgcatgcgtggttgccgggagttcggggagtaaagctgatcgcagcatgtttcttcttggcgatgaccgtagtgtcttaatgccagaatacgctgaggaaatggtgtgggaagtcggtaatcatggtttcaatttgtacttaagtccttccatcccacgtcgcatcgaggaattgatcccgcctcagattgagggatggttcgccgatgaacccttacctaaattgtgggcgatccatccgggcgggaaaggcattgtggatgctgtacaggcttcttttggtttgtcggatgagcaggtggacccctcacgcaccgtgctgatgcgttacggtaacttatcaagcgccacaattcttttcgttcttcaacaaatgcgctcgcagttgattgagcgtgacatccgcgcggaggaggggatcgctatggcgtttggccctggtcttacggcggaacttcttcgtttccgctatgtaagcggggaggcggtagttcccgaggagcgcgtggaggacgcttatgtatga

SEQ ID NO: 177 - DNA, 1101 bp, Artificial Sequence
  PKS32
atgacagcaatcgtcgaacccgcagaagagttgtcagtgtttactggattaacggagattacacgctttgcgggtgtcgggacagcagtaagtgcgagttcttattcccagtctgagcttcttgagattttagacgtagaggatcccaaaattcgcagtgtctttttgaactcagccattgatcgtcgtttccttactcttcctcccgagtcaccagggggaggccgcgtaagcgaaccacagggtgatttattggataagcataaaaagatcgctgttgatatggggtgtcgtgccttagaagcgtgtttaaagagtgcaggggccaccttgtcggatcttcgccatctttgttgtgtaacaagtacaggctttttaacgcctggcctgagcgctcttattatccgtgagttgggtattgacccacactgctcgcgctccgatattgttggcatgggctgcaacgccggtttgaacgccctgaacgtcgtggcgggatggagcgccgcgcatccgggcgagttaggtgtagtcctttgtagtgaggcttgtagcgctgcttatgcactggacggtacgatgcgcacggcggtcgtgaattccctttttggtgatggctcggcagcgctggcagtcatcagtggggatggccgtgtgcctgggccgcgcgtgttaaagttcgccagttatattattacggatgctgtagaggcaatgcgttacgattgggaccgtgatcaggaccgcttcagctttttccttgacccccagatcccctatgtcgtaggcgcgcacgccgaaatcgtcattgatcgtttactgtctggaactgggttgcgccgctctgatatcgggcattggttagttcactcaggcggaaaaaaagtcattgatgcagtggtcgtaaaccttggcttatctcgttatgatgtgcgtcatacgacaggagtcctgcgcgactacgggaacttgtcttcagggtcgttcctgttcagttatgaacgtttggcagatgaggatgtggctcgcccgggggagtacggcgttttgatgacaatggggcctgggagtacgattgagatggcacttatccaatggtga

SEQ ID NO: 178 - DNA, 1032 bp, Artificial Sequence
  PKS34
atggatatccgtcacttcatggagggtgtgttcgctttggatccggtggagcgccgtaagttggcatacctgtatcagcactcagggatcgacaaccgctactcagtcattccagattacagtttgccaccagcagcctggcaattttattcccccgaagaaagcttggaaccatttcctgatatctccaagcgtatggactggtataaacgctatgcggctggcctttccgtggccgctatcaataactgcttgcaagaccagtgtcttcgccaggaatgtgttacacaccttattactgtatcctgtacaggtatgtccgcaccgggtttggatgttgagttggtcgaattactggggtttccgcgttcgaccaagcgctcgtcaattaattttatggggtgctacgcggccattcatgctttacgccaaggcgatcagatctgccgtgccgaacgtgatgcccgtgtgttaatcgtctgcactgaactttgcacgttacactttcaaaagaccccttccccggacaatattgctgcttcattgcttttcggagacggttctgccgcagtattgttaggtaatggcgaaggtggccttgctacgattcgtgatttttatgcagaattcttgcccagtgggaaaaaggacatgtgctgggagattaccccctacgggttcgctatgacattatcaggctatattccggaattaattcgcgccgacttccgtccccttgtggaccgcgcgttggagaacgccgggtgggtggccgctcaggtcgatgactggtgcattcaccctggaggcaaacgcattcttcaggccgtagcccactgtcttgacttgcccgatgcacagttggaagacgcttacggtgtattgcgcgaatttgggaatatgtctagcccgactgtgctttttgtgttgtcacgtatgcttgcaaagggaactgggggaaagaccctgatggccgcatttggccctgggctgtgtattgaaacatgctgtttggaagcggtcgtgtcatga

SEQ ID NO: 179 - DNA, 1221 bp, Artificial Sequence
  PKS35
atgaccgtacgtatgcttagtatcgaaacagtagtacccgaaacagttattcgccaagaggatgtaactcgtttgtttgctggtcaaccgggtatgacacgcttaggttctcgtcttgttcgttcagcttttgacggtgcgggcgtagctacacgtcacaccgttttgccagagcttgcggaggccacagctcgcgcgagccatgcaccaacagcgggacctgaggacgatcgcgaacgcggccaattgacacctccacgcactccgcacggggagcccccaggtgacgatgctgctgcaagcccattcgtggatcccgtgaccggacatttactgtctccaggcacccacgcgcgtaatcaaatttatactcgtaacgcccgtgaactttttgtggcagcaggccgcgcggccctttcaggagtgggcccaggtatcacagccgcagatgtgacgcatgtggtcactgtctcctgcacaggattttttgcacccggtccagatgttcgtgtagccaaagatctgggattacctgccgatgtgaagcgcgtgcacctgggattcatgggttgtaacgctgctttccctgcgttacaaaccgcggctacagcttgccgtgcggatcccgacgccgtggtcttagtagtctgtgtggagctttgtacccttcaccttcacgttcgcaacgacccagatactgtgatgggtaacgccctttttgcggatggagcggcggctgcagtcgtaacggcacgcgacgtagccgtaccgggggctgccttagagttagtggattttgaaacgaccttggcccctgtgggagaggatgaattggcttggagcgtcggagacgaaggatttgagatgattttaggtacttatgtacctcgtatcattgacgatcatgtcacggatgcgcttgctccccttttgcgccgcactggtttggcggtcgaggacatccctcagtgggccgtgcacccagggggtcgttccatccttgacaaggtggaatctcgcttgggacttagcgcagagcagatggctccgtcacgcgcagttctgcgcgacgcaggcaatatgtcgagcgtcacgatcttgtttgtattggcacgtcttttgcataccggtatgtcgggtcacgtagctgctatggcgtttggtccaggactgtcaattgagtccgccttgttacgtcttttacccgcggcccagcgctga

SEQ ID NO: 180 - DNA, 996 bp, Artificial Sequence
  PKS36
atgaaggagaagctggagcgtctttgtaaaaacaccacagttaagcgccgctttacggtgatgtcgaaggagattttggagaaatacccggagctggcaaccgagggtagccctacgattaagcaacgtcttgatatcgccaatgccgcagtgcttgaaatggcggtcgaggcttctcgcgcatgtatggcagagtggaagcgtgccgccggtgatatcacgcacattgtgtacgttagctcgtcggagattcgtcttccgggaggcgatttgtatttggcggatcaattgggtctgcgttcaaatgtgggccgcgtgatgctttactttttggggtgttacggcggtgttgccggacttcgtgtggcaaaagacattgccgagaataatccaggatctcgtgtattgctgacgacatctgagaccaccatcttggggtttcgcccgcccaacatggcacgcccatatgatcttgttggcgcagcccttttcggtgacggggctgctgcagtggtaattggggcggacccggtcgaaggaacagaaactccctttatggaattggattacgccgtgcaacaatttttgccgggcacgcacaatattattgacgggcgcatctctgaagagggcatctcattcaaattaggacgcgatctgccccagatgattgaagggcacatcgagggattctgtcgcatgttgatggctaacgcggggttgcaggattttaacgagttgttttgggctgtgcatcccggtggccctgcaattttaaatcgcctggagagttcattaggtcttcgccccgaaaaacttcagtgtagtcgccgtgctttgatggactatggcaatgcaagctccaacaccgtcttctacgtgatggattatgtacgtgaggaacttcgccgcgaaggaggcgaagagtggggtttggtgttggcattcgggcccgggatcacgtttgaggggattttggttcgttccttaaaatga

SEQ ID NO: 181 - DNA, 1050 bp, Artificial Sequence
  PKS37
atggcggttcctgtgatcgccggtttaggaacagcccatccgccgtcggcggcgcaggacgagctgtgggaagggtttttttcaaaacacttctccgggacgacacgcgcgttggcccagcgcatttttgctaactccggggtaacccgccgtcaggccgcagtaaatccgttattggaggacgtatcggactggcccactgagcgccgtatgcgtcgttatcaagttgaggcgttgcccttaggcaaagaggcggtgggacgcgcactgaccgcagcgggattagcggcgggagacattggtttattcgtggtttgctcttgcaccggatatgcgacacccggtttggacattttgcttgcccgcgatctggggatggcccccgacacgcagcgcgtttttgttggccatatgggttgttatgccgcgctgccgggccttggtgccgctagtgactttgtgaccgcgcgcggacgcccggctcttttattgtgcgctgagcttacgtcgctgcatattcaaccttccaccgctcgcgtagatacccagcaaatcgttagccatgctttattctctgatgccgctgtcgcggcagtcgtggttccggggggccgtggctacgcccttcgcgaggttacttcggtcactgatacgtctacagctgaccacatgacgtgggatgtaacagacacaggatttcgtatgggtctgtcgcctaaggtaccccaggtcttaagtcgtcacgtccgcggtttggtagacgatcttctggctcgtcatgggggaacgaccgccgaagtggacggatgggcagtgcatccggggggcccgcgcatccttaatgttgtggagcgcgaattgtcgcttcccccggaaggtttagcagcctcgcgcgccacattggatgaacatggaaactgctctagcccgactgtgcttctgattttagatcgtcttttccgtgcagctgctcccccgcgtcgtgttgtcatgcttgcattcggtcctggtcttacactttacgctgccttgctggatcgtcaggactga

SEQ ID NO: 182 - DNA, 1170 bp, Artificial Sequence
  PKS38
atggtctcagttgctgaaattcgcaaagcgcaacgcgcggagggaccagcaactgtattagctatcggtactgcgactccgagcaactgtgtggtgcaatctgaatacccggatttttacttccgtatcacgaactccgagcacaaaactgaattgaaggagaagtttaaacgtatgtgcgacaaaagcatgatcaagaaacgctatatgcatttgacggaagagatccttaaagagaacccgtcgatgtgtgagtatatggcgccctcattggatgctcgccaagatatggttgttgttgaggtgcccaaactgggaaaagaagcggctacgaaagcgattaaagagtggggtcaaccaaaatcgaaaatcacccatttgattttctgcaccacgagtggcgttgacatgccgggagccgattatcaactgaccaagctgttggggcttcgcccatctgtaaaacgctacatgatgtaccaacagggatgtcttgctggtggcacagtgttacgcttggccaaggatttagccgagaacaataaaggcgctcgcgtcttggtagtgtgttcggaaatcacagccgtcacttttcgcggccctaccgacacacaccttgactcattagtaggccaggccctttttggagatggagccgccgccgtcattgtggggagcgatccccttcccgagattgaaaagccgcttttcgaactggtttggaccgcccagactattttgccggactccgagggggcgatcgacgggcatttacgtgaggtcggcttaacttttcatcttcttaaggatgtacccggacttatcagcaaaaatattgagaaagccctggtggaagcttttcaaccattagggatttcagactacaattctatcttttggattgcacatccaggggggcctgcgatccttgaccaggtggaagtgaaactgggtttaaaaccggaaaaaatgcaggctacgcgtcacgttttatcggaatacggaaatatgtcatcggcctgtgtattgttcatcttagatgaaatgcgtcgcaagtcaaaagaaaatggtcttgccaccactggtgaaggattggaatggggtgttttatttggatttggcccaggtttgacggtcgagactgtagttctgcgttctgtagccgcctga

SEQ ID NO: 183 - DNA, 1179 bp, Artificial Sequence
  PKS39
atggccagcgtggaagagattcgcaatgcccagcgtgctaaaggcccagctactattttagcgattgggacggccacgccagatcattgtgtatatcagtccgattatgcggactactatttccgtgtaaccaaatcagagcacatgacggaactgaagaaaaaattcaaccgtatctgtgataagtccatgatcaaaaaacgttacatccacctgactgaggagatgttagaggaacatcctaatatcggggcttacatggccccatctcttaacatccgccaggagattatcactgcggaagtgcctaaacttgggaaggaggcggccttaaaggcattgaaagagtgggggcagcccaaaagtaaaatcacacatttagtcttctgcaccactagcggcgtagaaatgcctggcgctgattacaaattagccaacttgctgggattagaaaccagtgtacgtcgtgtaatgttataccatcaaggctgttatgcaggaggaacagttttgcgtacagccaaggatttagctgaaaataatgccggcgcccgtgtgctggttgtttgctcagagatcactgtcgtgacatttcgcggaccatcggaagatgctttggattcgcttgttggtcaagcgttgtttggcgacggaagcgcggcagttattgtagggtccgacccggacgtcttgattgagcgtccgttatttcaattggtgtctgcagcccaaacatttattccgaattcagccggcgccatcgctggtaatttacgcgaggtagggttgacgttccatctgtggccaaatgtacccacccttattagcgagaacgtggagaagtgtttgacgcaggcattcgacccacttggtatcagtgactggaattcgcttttttggattgctcaccccggaggacccgccatccttgatgcagtggaggccaaattaaacctggataagaaaaagcttgaagctacccgccacgtcctttccgagtacggcaatatgtcctctgcatgtgttttattcattttggacgagatgcgcaagaagtctcataagggcgaaaaggccactacgggagagggcctggagtggggagttctttttggttttggacctggccttaccatcgagaccgttgtattgcattctattccaatggtgacgaactga

SEQ ID NO: 184 - DNA, 1176 bp, Artificial Sequence
  PKS40
atggcccctgaggagtctaaacatgcagagacggcgaatcgtgccacggccaccgtcttagcaatcggaacggcaaatccacctaattgttattatcaagccgactttccagacttttattttcgcgtgaccaactccgatcatctgacacacttaaagaataaattcaagagcatttgtgaacgtagtaagatcgagaaacgctacctgcacttaacagaggaaattcttaaggaaaatcccaacattgcttcttacgaggcgccttcgcttgatgtccgtcaaaatatccaggtcaaagaggtagtcaaactgggaaaggaagctgcgttgaaggcaatcaatgaatggggacagcccaaatcgaaaatcacgcatcttattgtatgctgcatcgcgggtgtagatatgccgggagcggactaccagttaactaaggtattggggttgcaactgtccgtcaagcgtttcatgttctaccacttgggttgttacgctgggggtaccgtattgtgtctggcgaaggacattgctgaaaacaataaaggtgcgcgcgtgcttattgtttgctcagagatgactcctatttgcttccgtggaccgtcggagacccatattgactctatggtgggtcaagctatttttggagatggcgcggcagcggttatcgtcggtgctcatcctgacttgtcgatcgaacgccctatttttgaactgattagcacctctcagacaattatccccgaaagtgatggtgccatcgagggacatctgttggaagtgggacttagcttccacttgcaccagaccgttccctccctgatttccaatagtatccaaacgtgtctgtcgaaggcttttacgccacttaatatttctgactggaattcgttgttttggatcgctcacccgggtggccgcgccattcttgacgacattgaggcaactgttggattgaagaaggaaaaattaatggctacgcgtcaggtattgaacgattacggcaatatgtcgtccgcctgtgtcttcttcatcatggatgagatgcgcaaaaagtccattgcgaatgggcaagtcacgacaggtgaaggactgaagtggggagtcctgttcggcttcggccctggcgttaccgttgaaacagttgtcttgcactctgttcccttgatcacttga

SEQ ID NO: 185 - DNA, 1170 bp, Artificial Sequence
  PKS41
atggtgtccgtatcaggtatccgtaatgtagaacgcgcagaggggcctgcaacagtactggccattggcaccgccaacccgtcaaactgtgttgaccagtccacgtacgccgattattatttccgtgtaactaattcagagcacatgaccgacttgaaaaaaaagttccagcgtatctgtgaacgcacccaaatcaaaaaccgtcacatgtacttaactgaggaaatcttaaaagagaatcccaacatttgcgcctacaaggcgccctccttggacgcacgcgaggatatgatgattcgcgaagtacctcgtgtgggtaaggaagcagccaccaaggctatcaaagagtgggggcagcccatgagcaagatcactcatttgattttctgtaccacgtcgggagttgctcttccaggtgtagactatgaattgatcgtacttcttggccttgacccatgtgttaaacgctatatgatgtatcaccagggttgttttgctggtggcacggtgctgcgcttggccaaggacttggcggagaataacaaggatgcgcgcgttttgatcgtctgctccgaaaacaccgcggttactttccgcgggcctagtgaaacagacatggattcgttagtgggacaagcattgttcgctgatggtgccgcagccatcatcattggcagcgatcctgtgcctgaagtagagaaacctttgtttgaaattgtgtcgacggatcaaaaactggttcctggttcgcatggcgcgatcggagggctgctgcgtgaggtagggctgacattctacctgaataaatcggtcccagatattatttcccagaatatcaacgacgcacttagcaaagcgttcgatccattgggaattagtgactataactcgattttctggatcgcacatcctggaggacgcgcgattttggaccaggtcgagcaaaaagtgaaccttaaaccggaaaaaatgaaggccacccgcgacgtgttgtctaactatggtaacatgagttcagcctgcgtcttcttcatcatggacctgatgcgtaaaaaatcattagaggagggattaaagaccactggagaaggccttgactggggtgttttgttcggtttcggaccgggtttaaccatcgaaacagtggtccttcgttcagtggcaatttga

SEQ ID NO: 186 - DNA, 1083 bp, Artificial Sequence
  PKS42
atgccaaaaattatctctatttctacctaccagccgccatacaccctgcagcaggataacgctgaagaacttacgaaagagttgttttatgcgaagattccaaaattagagcgttacttgaaggtttttgaaaatgggggaattgacacccgccatttttgtgttcctgcggaatggcaccgcacgaaccattccttcgaggaacgcaataatttatacatcgagttagcgacccagtacagtgttagcgtgatccaggcctgtctggcgaacacggcatttttgagcagctcgatccccaccgaagacatcgacgctatcatcttcgtatcgagcacaggaattagtacgccttcaatcgatgcgcgtgttatgaacaagttaccgttctcagaccgcttaaagcgcatccctttatggggattgggatgcgctggcggagcggctggggtctctcgtgcatacgacttctgcaaggcccatccgcatgccaaggttttggttgtgtgcgtagaactttgttcgttgacgttccagcccaacgacttctcgaagagtaatcttatcggagcatcgttattcgccgacggtgccgcttgtattttagtgtgtggggacgaggtagccatcgcagctaaacgcccgactcctaacattcttgccacaggttcaaagtggatgcccgactctgaaaatgtaatgggttgggacgtaaaaaacaatgggttacatgtgatctttcagaagtccattccgtcgatcattacgaattggctgggcccgtttattgagcaattcctgatggaccaagagttgtactccgaacagttgacgcatttcatcgcgcacccaggaggtaagaaggtcctgaaagcgtacgaggatactttgtacttgtcacctcaaaagaccgacatcagccgcgagatccttcgtcagcatggtaatatgtcttccccgacagtgttgtacgtcttggagcaattcatgcttcacgagggccaagtggaggacactggcctgttggtggcgctgggtccgggtttttgcgccgaggctgttttactgaattggcgcgaatga

SEQ ID NO: 187 - DNA, 1173 bp, Artificial Sequence
  PKS43
atggtctccgtaagcgagatccgcaaggcgcaacgtgctgagggacctgccacggttatggccattggaactgccaccccaccgaactgtgtggatcagagtgaatacccggactactattttcgcattactcaaagtgagcacatgacagaattgaaggaaaaattcaaacgcatgtgcgataaatccatgattactaagcgctacatgcatgtaactgaggacattcttaaggaaaatccgaatatgtgcgcatacatggctccatcgttggacgcgcgtcaggatatggtggtcgtagaggtacccaagttgggcaaggaagcagctacaaaagcgatcaaggaatggggtcaacctaagtctaagatcacgcatttgatcttttgtacaacatcaggtgtagatatgccgggggccgactaccagttgacgaaacttttagggctgcgcccctatgtgaaacgctatatgatgtatcagcagggatgtttcgcggggggaacagtcttacgtttggcgaaggacttagctgaaaacaacaaaggagcccgcgtgttagtggtgtgttcggagatcacggctgttaccttccgtggcccttcggatacgcacttagattcgttggtcgggcaggcgctgtttggcgacggcgccgctgctgtaatcgttggttctgaccctctgcctgaaatcgaagaaccactgttcgaacttgtatggacagcacagactattttacccgattccgagggcgcgattgatggacacctgcgcgaggtcggactgacgtttcatcttctgaaagacgtgccgggtttgatctccaaagatatcgaaaaagcgctggttgaagcctttcagcccctgggaatcagcgactataactccattttttggattgcccatcctggaggaccagcaattttagatcaggtcgaagccaaattggagcttaagcccgagaaaatgcgcgccacccgtcatgtcctttccgagtatgggaacatgagtagtgcttgtgtacttttcatcttagatgaaatgcgccgtaaatcaattgaggatggcctgaaaaccactggggaggggttagactggggtgttttattcggctttgggccggggctgacggtagagacggtggtgctgcgctccgttggagtcaattga

SEQ ID NO: 188 - DNA, 1182 bp, Artificial Sequence
  PKS44
atggcaagtgtagaggaaatccgtaatgctcaacgcgcccaaggacctgcaaccattcttgcgatcggaacggcgactccggcacactgtattaatcaggcagagtaccccgactactatttccgcatcactaatagtgaacataaaactgaattaaaagagaaatttaaacgcatgtgcgataagtccatgatcaataaacgttatatgtatcttactgaggagatccttaaggaaaaccctaatatgtgcgagtacatggcacctagcttggacgctcgccaagatatggtagtagtggagattccgaaactgggcaaggaagctgccactaaagcaattaaggagtggggacagccgaaatcaaaaattactcacctggtgttttgtaccacctccggtgtagacatgcccggcgcagactatcaactgactaaactgttaggtctgcgcccctctgtaaagcgcctgatgatgtaccaacaaggctgttttgcaggtggtactgtgctgcgtttggcaaaagatttagcggagaacaataagggaccccgcgtgttagtggtctgtagtgagatcacggcagtaacattccgtggccccagtgacacccacttggattccttagtcggacaagcgttgttcggcgatggcgcagcggcggttatcgtaggagccgacccggatgttaaaatcgaacgtccgctttttcagatcgtatccgccggacagaccatccttccggattcagacggggccatcgacggacaccttcgtgaggtaggccttacctttcatttgttaaaggatgtgcccggccttatttctaagaatatcgaaaaaagtttggtagaggcctttaaaccaatcggcattaatgattggaatagtattctttggatcgcccaccctggtgggccagcaatcctggaccaggtggagctgaaattaggcttaaaggaggaaaagctgaagaatacacgtcacgtgctgtcggagtacggcaacatgtcgtcagcatgtgtcttgtttatcctggatgaaacccgtaagcgtagcctggaagagggaaaggcaactaccggagagggactggactggggtgttctgtttggcttcggacccggtttgaccgttgagactgtcgtactgcacagtgtgcccgctatcacgaaccaatga

SEQ ID NO: 189 - DNA, 1089 bp, Artificial Sequence
  PKS45
atggcgagcattgtctcggtcggtttgtgtacgccaccatatcgcatttcgcaagaaaaaactgtcgaattcgcacgcgagttattccaagactctttccacgaaattgaacgcctgttaaaagttttcgaaaacggccaaatcaaagaacgctatttctccgttccgcttgaatggttttctaaagaccactccttcgctgagaaaaacgaaatcttcatcgaaaaagcggtagagtttggtatctcggcaattaaggaatgtttacacaaccccacttaccttcagaagccaattccatttgaggacattgacgccatcttctacatcaccagctctgggcttgctacacccagtattgacgcgaaaattatgaatcagcttctgttccgtaaatcatgcaaacgtattccgatctggggcttagggtgcgctggcggcgcttctggcctgtctcgcgcgttcgaatactgtaaagcctttccaaaagctaaagtcttggtcttgtcagttgagctgtgtagcctgaccttccagaaggatgatcattcgaagagcaacctggtgggcacatctcttttcgcagatggggtggcctgcgcattaattacgggatcggaggccgatttgtccttgaaagattcctctatcgccctgccgcgtatcttggcaactcaatccatgttaatgtcggatagtgaggatgtaatggggtggtcaattcgtaaagaaggcttttttgttatcttctccaaggacattccaacaatcatccgtacatgggtgaagtcaaacgtacagaattttctggatgagcaagagcttactatccaggatattgaacatttcgtcgctcacccgggtggtaaaaaggtactggaggcgtatgtagagacattaggcatgggccaggaaaaaatcaacaacagcttagagattttgacgaattatggtaatatgtctagtgccaccattttgtacgtattgaagaagttcctggagaactcttcaaagaaaggggaccttggcttagcagcggcagttggtccggggttctcctcggagttgttactgttacgttgggagtga

SEQ ID NO: 190 - DNA, 1173 bp, Artificial Sequence
  PKS46
atggtcacagttgaggaagtacgcaaggcccaacgtgccgaaggccctgcgactgtgatggctattggtaccgcagtaccgccgaattgcgtggatcaagcgacgtatcctgattactacttccgcatcacgaattctgaacataaggcggaattaaaagaaaaatttcagcgtatgtgtgataagtcacaaattaaaaagcgctacatgtacttgaatgaagaagtcttgaaggagaatccaaatatgtgtgcttacatggccccctctctggacgcacgccaagacatcgttgtggttgaggtaccaaagctgggaaaggaggcagcagtaaaagcgattaaagaatggggacaacccaaatcaaaaattacccatctggtcttctgcactacctctggtgtagacatgcctggagccgactaccaactgacaaagttgttgggcttacgcccttccgttaaacgcttgatgatgtaccagcagggatgcttcgctggtgggaccgttctgcgcctggcgaaggatttggcggaaaacaataagggtgcccgcgttctggttgtgtgtagcgagatcactgctgtcacatttcgcggcccaacagatacacatcttgattctttagtaggacaggcgttgtttggggacggtgctgcagcaatcatcatcggctcggaccctattcctgaagtggagaaacctctttttgagctggtttcggccgctcagacaatcttgccggatagcgagggagcaatcgatgggcatcttcgtgaagttggattaaccttccacttgctgaaagatgtaccgggtttaattagcaagaatgtcgagaagtcgctgaccgaagctttcaaacccttggggattagcgactggaacagcttgttctggatcgcacatccgggcgggcctgcgattctggaccaagtggaggccaagttgtcgcttaagcccgagaaattgcgcgcaacccgccatgtactgagcgagtatggaaacatgtctagcgcatgcgtcttgttcatcttagacgaaatgcgccgtaagtccaaggaagatggtttgaagacgacaggggagggaattgagtggggagtgctgttcgggtttggtcctggccttactgtagaaacagtagtactgcattcattagcgattaactga

SEQ ID NO: 191 - DNA, 1089 bp, Artificial Sequence
  PKS50
atgaccaccacgatcgcacgcatcaaccgcatcggtaccgctaaccccccatttgaggtccatgacgcattcttgcgtttcgttatttctgggattgctgacgaacgcactcgtcaagtgtttgaacgtatggccgctcgcagtgggattgagcgccgcttctcttttttagaaccagttacccttcaggatggtacggttacggatacagaaggattctacggttctggtccgtggcccagcacaggttcccgcatggaacgctatgaacgcgatgcccctcgtttagctctggacgctattgcggcgcttggcctggacattgcccgcgagggcatcacacatctgattgtcgcctcctgcacgggctttatggcgcctggtttggaccaagcgattgtcgcaggggctggtcttgatccgggggtcgaacgcacagttgttgggttcatgggttgttatgctgctgtaaatagcctgcgtttagctcaccatatcgtacgctcggaacctgcggcacgcgtactggtcgtgacactggagctttgctccattcattttcagcgtagtgacgacttaccctcattgctggcgatgttacttttcggcgatggtgctgcagcagcgcttgttacagcggaaggtggggggatcgcccttcaagacttccgtgcagttacaatccccgataccgccacggccattacatggaatattcgcgaccaagggttcgatatgcacctgggtggagaggtgccagctcgtattgcggcagctctggcttctgaggcgaagcgtggtgacgagcatggccttttgcgcggcggctctcccgatgatttcgcattatgggcggtacacgccggaggccgtaccgtattagatgctgtagagcagggcttcggcttaggcgcagaggcattagctccatcgcgcagcgtcttgcgcgatcgtgggaatatgtccagcgctacacttatgtttatcttagcgcagatgttaagttcaggcgcccaaggtcctggcttggcgttggcgtttggtcccgggatggccgctgaatccttccgcttcaccatcgaggattga

SEQ ID NO: 192 - DNA, 1179 bp, Artificial Sequence
  PKS51
atgttggcgactggtcgcgtggcgaaacagaaggagattgctcaaagtacacgtcgcgtggctaatcaagggaaggctacagttctggcgttaggaaaggcatttccatctaacgtagtctctcaggaaaatttggttgaggaataccttcgcgagattaagtgtgacgacccgtcgattaaagagaagctgcaacatctttgtaaaaccactacggtaaagacgcgttacaccgttatgtcgtcagagacgatgaaaaaatacccagagttggcaacggaaggctcgcctacaatcaaacagcgccttgagattgcgaatgaggcagtggtgcaaatggcgtatgaggcgagtttggcctgtatcaaggagtggggccgcggagtcgaagatatcacccacttggtgtacgtcagctcttcagagtttcgtttgcccggaggcgatttatatttgtcagcacaattaggcctgtcaaacgaggttcaacgcgtaatgttctactttctgggttgctatgggggcgtaagtggtatgcgtgttgctaaagatattgcagaaaataaccctgggtcacgcgtattgctgaccacatctgagacaatggtactggggttccgcccacctaataaggctcgtccctacgatctggtcggtgcggccttattcggggatggggccgcagcgctgatcatcggagccgacccaacagaatcggaatcgccatttatggagcttcactatgcgttgcagcagtttttaccaggaacccaaggggtgattgacggtcgcctgagcgaagagggtatttcgttcaaacttgggcgtgaactgcctcagaaaatcgaagacaacattgaagaattctgtaaaaagttagtggcgaaggccggatcgggaagtcttgaacttaacgatctgttttgggctgttcaccctggtgggcctgccatcttaaatggattagagacgaagttaaaactgaagcctgaaaagcttgagtgttcgcgtcaggcccttgttgactacgggaatgcctcaagcaacactattttctatatcatggataaagtccgtggggagcttgagaaaaagggacgcggaggagaggaatggggtttgggccttgcttttggaccagggattacctttgaagggtttctgatgcgtagcttatga

SEQ ID NO: 193 - DNA, 1179 bp, Artificial Sequence
  PKS52
atggcaaacttggacgagattcgtcagtcccaacgcgcagaaggacctgctactgtacttgccatcgggaccgccacccccgccaatatgatctaccagtcagaatacccagattattattttcgcattaccaagagcgagcatatgaccgaactgaaagaaaaatttaagcgcatgtgtgacaagtccatgattcgtaagcgctacatgcacttaaacgaagagattttgactgaaaaccctaatatgtgcgcgtatatggcgccgtcccttgatgcgcgccaggatatggtggtagtggaagtccctaaattagggaaggaagccgctgtcaaagcgatcaaagaatggggtcaaccaaagtctaaaatcacgcatctggtattttgcaccacgtctggggtggacatgccgggcgcggactatcaactgacgaagttattaggtctgcgtccatcggtgaatcgcttaatgatgtatcaacaagggtgtttcgccggtggcactgtgttgcgcttagcaaaggatcttgctgagaataataagagtgctcgtgtcctggtcgtgtgtagtgaaattacagcagtgacgttccgtggcccgaacgactcgcacctggatagtctggttggacaggcactttttggggatggcgcggcggcgatcatcatcggagcagaccctgatttggctgtagaacgtccattgtttcagttagtttcagcatcacaaaccattttgccagactctgaaggcgcaatcgatggtcatttgcgtgaggttgggttgactttccacctgcttaaagatgttccagggttgatctcaaaaaacatcgagaagtcattgacgggagcatttcaaccactgggtatctccgattggaatagcatcttttggatcgcacatcctggtggacctgcgatcttggatcaggtagaagaacgtctggcgcttcgtaaagaaaaaatgaaggcaactcgccacgtgctgtcggagtatggaaacatgagctccgcttgcgtgcttttcatcttagatgagatgcgcaaaaagagcgttgaagagggtaaggcaacaacaggggaggggttagaatggggagttcttttcggctttgggccaggtttaacggtcgaaactgtagtgttacactcgctgccaatcgtggctgcatga

SEQ ID NO: 194 - DNA, 1173 bp, Artificial Sequence
  PKS53
atggtaaccatcgatgaaatccgcaaagcccaacgcgcggatgggccagcgaccatcttggctattggaacagctaatcctcaaaattgtatcgagcagagcacatacccagactattactttcgcgtaacaaacagtgagcatatggtagaactgaagcagaagtttaaacgcatgtgcgagaagagtatgatcaagaaacgctatatgtacttaactgaggaaatcttaaagcagaaccccaacttatgcgcttacatggcgccttcacttgatgctcgccaggacatggttgtggtagaagtaccgcgtcttggaaaagaggctgcggtgaaagcaatcaaagagtggggacaaccgaaatccaagatcacacacttagtcttctgtaccaccagtggagtagacatgcccggtgcggattaccagctgacgaagttgctgggattgcgtccgagtgtgaagcgtctgatgatgtatcagcaaggctgctttgctggagggaccgtcttgcgtttagcaaaagacttggcagagaacaatcgcggcgcgcgtgtgttggtcgtgtgctctgagattaccgctgtgacttttcgcggtcccacagatacccatctggactccctggtagggcaagccctgtttggggacggcgcggctgccatgatcatcggggcagacccggtagagaatgttgaacgccctatttttaagcttgtctcggcagcccagacgctgtgtcccgacagcgaaggtgctattgacggacatttacgcgaagtcggactgaccttccatctgctgaaggatgtccccggcatcatctctaagaatattgagcgctgtttggacgatgcattcaaacctttgggcatttctgattggaatagtttattttggatcgcccatcctggaggacctgccatcctggatcaagtggaagaaaaactgaaacttaaagaggagaagatgcgcgcaacccgtgaggtactgtcagaatatgggaatatgagctcggcttgcgtggtctttatcttggacgaaatgcgtaagcgcagtgctgcccaaggtaaaggcaccacgggagagggacttgagtggggggtcttgttcgggtttgggccgggactgactgttgagactgtagtccttcattccgtagccactagctga

SEQ ID NO: 195 - DNA, 1179 bp, Artificial Sequence
  PKS55
atggccccctcggtcgagcaaatcggcaaagcccagcgtgccgaagggccggcaactgtattggctatcggtactgccaccccaccaaactgtgtatcgcaagccgattaccccgattattactttcgcgttacgaactcggaacacatgacagatcttaaggaaaaattccgccgtatgtgtgacaaatcgatgatcgagaaacgctacatgtatttaaccgaggaaattctgaaagaaaaccccaatatgtgcgcctacatggaaaagagtttagatagccgtcaagacattgtggtaactgaagtgccgcgcttggggaaggaggctgcgcaaaaagcaatcaaggaatggggccaagcaaaatccaaaatcacgcacgttattatgtgcaccacatcgggagtggacatgccgggagcagattatcagcttacaaaattgctgggcttgcgcccttcggtgaaacgctttatgatgtaccagcagggctgcttcgcaggcggcacagtattgcgtttagcgaaagatttggcggaaaacaacaaaggcgcgcgcgtattggtggtttgttccgaaattacagccgtgtgcttccgtggtcccactgatacgcatttagacagcatggtgggacaagcgttatttggcgatggggcgggcgctgtaatcatcggggccgatccagaccttagtatcgaaaagcctatcttcgagctggtatggactgcgcagacgattctgccggatagcgaaggagcaatcgatggccacttgcgtgaggttggcctgaccttccacccattaaaggacgttccaggattaatttcgaagaacattgacaaaagcttaaaggaggctttttcacctttaaatattgatgattggaatagtctgttctggatcgcacatccaggaggtcccgccatcctggatcaagttgaggcaaaattgggcctgaagcaagaaaagttaaaagccacgcgccaagtgttgaatgattacggtaacatgtcctcagcatgcgtattgtttattatggacgaaatgcgcaaaaaatccgttgaaaacggacacgcaaccacaggtgagggattagattggggagttctgtttgggttcggacctggattaacggtggagactgtggtcttacactcggtaccggttgctcactga

SEQ ID NO: 196 - DNA, 1050 bp, Artificial Sequence
  PKS59
atgagcaccctttgcctgcctcacgtcatgtttccacagcataagattacacaacaacagatggttgaccatttagagaatttacacgccgatcacccccgcatggcgttagctaagcgtatgattgctaatacggaagtaaatgagcgtcatttggttttacctattgatgagttggcagttcatacgggctttacccaccgttctatcgtatatgagcgtgaagctcgccaaatgagctctgctgccgcgcgccaagccattgagaacgctgggttacagatctccgacatccgtatggttatcgtgacgagttgcacaggatttatgatgcctagtttaaccgcacacttaattaacgacttggctttaccaacctctactgttcagcttcccattgctcaattgggatgcgttgctggggctgctgccatcaatcgcgctaatgactttgcacgcttagacgctcgcaatcacgtcttaattgtgagccttgagttttcttctttatgctaccaacctgacgacactaagttgcatgctttcatctcagcggcgttattcggtgacgcagtatctgcttgcgtcttgcgtgccgacgatcaggcgggagggttcaagattaagaagaccgaatcgtatttcttaccaaagagcgagcactatattaaatacgatgtaaaagacaccggcttccatttcactttagacaaggcagttatgaactcaatcaaggatgtcgccccggtaatggagcgtttgaactatgaaagcttcgagcaaaattgcgcacacaatgatttcttcattttccacaccggaggtcgcaagatcttagatgagttggtgatgcacctggacttagcgtcgaaccgtgtgagccaaagtcgttcttccctgtctgaggcagggaacattgcttcggtggtggtctttgacgttctgaaacgtcagttcgatagtaacttgaaccgtggggacattgggcttttagcggcttttggacccgggtttactgcagaaatggcggtgggagaatggactgcgtga

SEQ ID NO: 197 - DNA, 1182 bp, Artificial Sequence
  PKS60
atggccccaagcgtgcaagaaattcgcaaagcgcaacgcgcggagggcccggcaaccgtcttagcaatcgggaccgcgacccctccgaattgtatttaccaggctgattaccccgattattattttcgtgtaactaactcggaacacatgacggatttaaaagaaaaattccgtcgtatgtgtgataaatcaatgattgaaaaacgctacatgcatttgactgaagaaatccttaaagagaaccaaaatatgtgcgcatacatggcttcatctctggattcgcgtcaggacatggttgtctcggaagttccccgcttaggtaaggaagcggcacaaaaggctatcaaggaatggggtcagcctaagagcaagattacgcatgttatcatgtgcactactagtggggtagatatgcctggggcggattatcaacttacaaaactgttagggcttcgtccctcggtgaagcgcttcatgatgtatcagcaaggttgctttgcgggcggcacagcattgcgcttggctaaagatttagctgaaaatacaaagggggctcgcgtcttagttgtgtgttctgagattactgcgatttgcttccgtgggccgacagatacccatttggattcgatggttggacaagctctgtttggcgatggtgctggagctgtaattattggggctgatcccgacttaagcatcgaacgcccaattttcgagttggtctggaccgcccaaaccattcttcctgacagcgaaggagctattgatggtcacctgcgcgaagtcggattgacttttcacttattgaaagatgttcctggactgatttctaaaaacattgagaagagtttaactgaagccttcagcccgttaaacatttcagattggaattcacttttttggatcgcccatcctggaggaccggcaatcttagatcaagtggaggccaagctggggttaaaagaagaaaaacttaaagcgacccgccaggtcttaaacgattacgggaatatgtcctccgcatgcgtgctgttcattatggatgagatgcgcaagaagagtttagaaaacgggcatgccactactggggagggtctggactggggtgtccttttcggcttcggaccagggctgactgtcgagaccgttgtgcttcattctgtcccagtcgcacaccattga

SEQ ID NO: 198 - DNA, 1344 bp, Artificial Sequence
  PKS62
atggccgcctcgacagcaccgggtgagctggggctgtctattactggtctgggagtgcagtacccgccttattctctgggccccgactgccttgatatcctgtcgaaacgctattatcctgagagcccggcaatgaaaaaagtattagcgatcaatcgttatacgggtattgaccaacgtagtagcattggtaacccagaccaccctttagtaaatcagcccaatagtcccacagtagatgagttacacaaggtctttatgagtgacggagtgccacttgcagtcgaggcatctcgcaaggctatggcagaggcgcgtgtggagcctaatcaaattacacatatggttagtacgacatgcacggactctgcaaaccctgggtacgatcatttcgtggcaaaagaactgggattgtccgaccgtttagaaaaggtgttgttgcatggaattgggtgctctgggggtcttgcggcgttgcgtacagccgctaacctttgcttggggcataaggcacgcggaaaacctgcgcgtatcttagtccttgcactggaggtgtctacgatcatggttcgcagtgagttagagagtattaacgcgttgcaggagacgcgtatcgggatcgcattgttttcggattgtgcttctgccgtggtgcttagcaatggcattggagaggagccgggcaaacccgcaatctacgacttgctgggctgggagaaccgcgtaattccagattccgagcatgacttgggttttgatgtggacccgatggggtggaaggtagttctgtctcctcgtgttccggtgttagcgaaggcgtctcttcagcccacgtacacagatcttttgtcttcatttcaagaccaattgccatcgagctaccagaagccagcggatttcgattgggctatgcatccaggtggtgcgactattctgtcgggtgctgagtctgccatgggcctgacacctgagcacatgcgtgcgtcgtatgatacttatattaaccatgggaattcatcttccgcgactattttctcagtgttgaaccgcctgcgcgagaaagatatggatgccttagcacccgatggcaaagttaaagagtatatcgttggctgcgcgttcggccccggcattaatgttgagatgtgtatgctgaagcgtcgcatgaattgcccaaccacaaccacaaccggacttgatactcccccagagacggacgatagcgagggacctggtcctgggtctagtgcgggctccgaagatggggagagcattgaaggcgataaggaagacaagaaagagaagttcattagcgaggccttggacaacgtagaacttgattga

SEQ ID NO: 199 - DNA, 1362 bp, Artificial Sequence
  PKS63
atggccgcaccttccactttcggggaattgggattaagcatcatcggtctttcagcggagtatccaccgcacagccttgactacacctgtcttaatacattaggtgatcgtttttaccctgacactccgtccatgaagaaggtgttagggatcaatcgttacaccggaattgatacgcgctccagcatcggtactcccgaccacccagccgtaaataagaaggaagcaccttcgatcgcggaattgcattcgatttttcagtcggatggggtgccattggccattcgtgctgctcgcaaagccatcgacgaggcgaagatcgacacgcgctttatcactcatattgttgctacgacatgcactgattcagcaaaccctggcttcgatcacttcgtcgctaaaggactggggattacccacggggtcgagaaggtattacttcatggtgtaggatgttccggcggactggccacattgcgtacgggcgccaatttggccctgggtcacaaggcacgtggtctgcctgcgcgcgtccttcgtgttgctctggaagtgagcacaacaatggttcgtagcgagttagattctattaacgaattgcaggagacacgcattggcgcgtgtcttttctccgactgtgggtcagcagtagtattgagtaacggcatcggcgaaccttccgaaccagtctacgacttattaggatgggaccaccgcaccatccccgataccgaggacgatcttgggttcgacgtggacccagtgggctggaaggtgatcctgaccccgcgcgtccccaagttaaccgccgcttccatcggaccagcatttactgatttaaaagcgagcctgccacaactgccacctgactaccagaaggcggctgacttcgactgggcaatgcacccaggtggggctacgattctttcaggcgccgaaaaggtcatggacattacgccggagcaccagcgtgccagttatgacacttacatcaaccatggaaatagttcaagtgcgacaattttctctgtaatggaccgtttgcgttctaaggagatggatgcggttgcacccgatggtcgtgtacgtgattacgtagtgggatgtgctttcggtccgggaatcactgtggaaatgtgtatgttgaagcgtaatatgactccccgtactggcatcactgggctgcagacgccacctgagacgcctgctgagaccgagacggagccttcagaagccggggatggaggcgaatgggataccgaaaactccggttccccggcagaacgtaattcggtctctgagtcacaggaccagtacaccaagtttatcgcggaaagtttggaaagccttgatttggattga

SEQ ID NO: 200 - DNA, 1302 bp, Artificial Sequence
  PKS64
atggaagatttacagctgtcgattcttgggttaggcgtccagtaccctgcttattcattgccgccaagcgcaatttcggacttagctcgtcgtcattatggcgactcaccagctatgacacgcgttcttcatgttaatgagaagacaggcatcaccacccgctcatccgtggttgagatgagcgagagtctgctgaaccaacctacgccgccaaccattgccgaaatccaccaacagtatatggcgaaaggacttccactggctacaagcgcgtgccgtaaggctctggctgaggcgtcgctgggaccttctgacatcacacacatcgtcgcgacgacctgtaccgatagtgctaacccaggctatgaccattttgttgccgaagagctggctctgccatccaacgtcgagcgtgtgttacttcatggggtggggtgtgcgggcgggcttgcagtattgcgtaccgcggctaacttggcgttagggcattctttccgcggaaaacctgcccgcgtactttgtgtagcactggaattaaacacgaccctggtacgttccgagctggactcgatccatggccttcaacaatcgcgcattggggtgtgtttgttctcggactgcgcatctgccgtagtcctttcgaatggcgtcggtggtcgtcacgaacgccctgtctattcccttatggggtggaaccaccgccgcttacctggaactgaccaagagttaggttttgatgttgaccctcaaggctggaaggtcattttgactcctaaggttcccggccttacagctggagctttgccgagctcttttgcagacctggtccgcgacgctgcacgtcagttgccgccaggttatcgcgaagccgctgatttcgattgggcaattcatcctggaggtgctaagattcttgaaaacgccgccaagggattgggtattagtcgtgagcacatgtgggcctcacaggacgtttacgagaatcacggtaatagtagttcggccacaatcttttcggtcctggatcgtttgcgtcagggaaaagacgaagcgggacgctcccatgggggtcgtaaggaaggtcgtggagggcgccagtttgtggtggggtgcgcgtttggaccgggcattacagtagagacatgcatgttacagcgccatcgttctacgtcgcgtgttcccaaaggacatgacgatgtatcgccaccggagtcgaaggcggaggcaggctcaagtggcccccgccgtcgtcgcatctttcgtggttcattgtggcgcaaggttcagtctctttgctgctga

SEQ ID NO: 201 - DNA, 1227 bp, Artificial Sequence
  PKS65
atgtcccccgccaagttagcgacagcagctcaagctagtttcccggacaccgatttgcatattatgggaattgcagcagagtaccccgagcacatctgtagtacccaggactttaaggaattttgccttcgtaactatcctcgtactcctgcactggagaagcttttgatggttcacgagaatacggggatcgaaacacgtcgcactgcttgccacttcaccgatccgtttcttaatggaacgtctccgactattgaccagttatctgacttctatttaaagtacggagttgaattggcagtgggcgcgagtcgcaaggccatcgaggagtggggaggtgatgtcagcgaaattacgcacgtagtcgccaccacatgtacgaatagtgccaatcccggctatgattatttcgtcgcccgtgaattaggactgggcgatcgtgtggaacgtacgcttcttcatggagtcgggtgtgcaggtggtttaaccgcccttcgtacggctgctaacattgctctgggagcctcattcatgcaacgtccggcccgtatccttgtaatcgcgtgtgagttatcttctctgttagtacgctcggaattggattctatgcaagaaactggggaacttcgcatcggtgtgtcgattttttctgatggtgcttctgccgtgcttcttagtaatggcattggtgaatctccggatgccaaacccgtatacgatcttttgggttgggatcatttgactgtacctgaaacgcacgccgagatcggatttgacgtacaccccgctggttggaaggtgatcttgactccgaaggttccggctattaccgccactggggctcctccggtgtttgcttctttggtcccccgtattcccgctttgctgacagatggagttgctccaggggcggcggatttcgactgggcattgcatcccggcggggccaaggtccttaccagcgttcagaaggtgttggggttaacgacacagcaccttcgcgcttcgtatgagacatatcgtacaaaagggaactcaagttccgcgacgatttttagcgttatgaaccgccttcgccaacctgatatgggagaaggacgcaagaacgttgtagcttgtgcttttggccctggtgtagcaatcgagatggctatcctgaagcgcgtcaaggacgtcgctcctcacgcagatgttgcagccagctccgggtctagtgattcaggctga

SEQ ID NO: 202 - DNA, 1368 bp, Artificial Sequence
  PKS66
atgagcgtgagtaccgaggcccgtgagctgggtctttccattcttggactgggcacacgctacccaccttatacgcttgactcgcgcgcagttgaggaattatcaaagcgttaccaccctgaaactcccgctatgcagaaggttctggccattaaccgcttcacgggaatcgacaaacgcagttccatcggccgtcctgaccattggcttgtaaaccagccagagccccccacgatcgcgcagttgcatgacgtgtttatgtcggacggggtgccgttggcagtatcggcgtccaaagaagcattagcagaagcccatatcaacgatgtttctcagattacccatatggtctccgctacttgtacggattctgctaatcctggatacgaccactacgtggcgaaggcacttggcttatctccttttgtggagaaaacactgttacacggggtcggctgcagtgggggccttgctgccttgcgtaccgcagccaacttgtgccttggacattccatgcgtggcctgccggcgcgtatccttgtagtggcgcttgaaatctccactacgttagtccgctccgagcttgaatctatccattcaaatcaggagacgcgcatcggtatttgcttgttcagcgattgcgcttccgctgtagtggtctctaacgacattccattctctccgaccgagcctttacccccgccggtctattctttgctggactggcgccaccagactgtccctgacacagaacaagacttgggatttgacacgcacccgcagggttggaaagttgtcctgtcgcctcgcgttccgaacctgacagcttcggtgcttgagccgacctataacagtttgatgtcgggtaagaaacttccggaggggtatgggtctcctaaggacttcgactgggccatgcacccaggaggagcgacgatcttgatgggcgcggagaaggtccttgggatccaacccgagcacatgcgcgcatcctatgacacatatgtcaaccatggaaattcgagcagtgctacgatctttagtgtccttaaccgccttcgtgggaaggagatggacggggtggctcctggcgggcgtggagcacgcgaacttgtagtgggttgcgcttttgggcctggcattacggtggaaatgtgtttactgcgccgtaatctgtcacgtacggaaggaggacgtaagggcatggaaacgccgccggaaactgaagagtcatctgaggacggagaggggggccgtgaagttagtgaggaagaaaagaagggtagcgaagtttctgaggaggaaaagaagggatcggaagaggaggcttttattgcgaaggcacttgaatcagttgagcttgattga

SEQ ID NO: 203 - DNA, 1293 bp, Artificial Sequence
  PKS67
atggtacacaatggcaagccggaaggcgtttatattacaggtcttgcacatgaatacccgcaattctccgtaaagcaagaccaattccaaggtcttcttgaaaaattgtatccgggacattcgaacgtcaaagggctgcagaaattagtggcgttaaacaacaaaacgaatattctgtcacgtccaacagttcacgactatacgcagtggactaaagaggatacagaacctccaacaatcgattcgatttcacgtgtgtttcgtgcggtctctggcgacattgcaacaagcgcgtgcaacaaggcgattaaagaggctggtctggcgcccaatgatattactcatgtcgtggccgttacatgcactgatcaaggtaaccctgggtacgatttatttgtttgccaaaaactgggccttcgcccagaagtccagcgtgtccttttacaaggcgtcggatgtgcaggtggcctttcagcactgcgtactgcggcgggaatcgtagcagcatcgtcgcagaagcatcgcccagctcgcgtacttgtcatgacctgtgaattgtgctctctgttcttacgtgccgagttgcaagcggcaatccgcgacggcgacagtcttcatgtggcacctgctctgttcagtgacgcagcagcagcattggtagtttgcaatggggacgcattgggggaggcgcagaaacctatctttgaactggaggagtatggatccatggccgtcccaggtacttcggggtatatgagctacgacattgagaagaatggtatgattgctcgcattacaaaagacgtcccgaaggcggcagtctcggccatcattccgatgtttaaacaacttcaatctgcgagtagctctagtcatgggcacggttttccggcccactactcgccacttagcacgtttgattgggccattcaccctgggggtgcggcaatccttgaaggagcaaagcaagctttgcagctgaccgatgatcatattaaagccagcttggatgtttaccgtaattacggcaatagctcgtcgtcaactgtattgattgtgttagataaacttcgtaacatgggcaagggccgcgacaaagttgtcgccacgtcgtttggcccagggctttctatcgagatgtgcatcttaaaacgcagccgccactcgttgggatcagtgttcactatggtccaacgtcactccaagatttgcgcagtgtggttatcgctgatctccaaactgtctcgcggagtctcccgtcgtgaacctgctgtcaagaaaatggatgaatga

SEQ ID NO: 204 - DNA, 1212 bp, Artificial Sequence
  PKS68
atgtctccgtcagcactgaacggatcgactagccacgaccgttttgagaataatttgaatcttagtatcgtcggcttaggaactgagtatccaccatttcaactgggaccagaagctctggagaccctggcgcagcgtttctacccacccagtacggcattgtccaaagtattgtcaattaaccgcttcacaggcattgatacgcgtgccgcgatcggaacggtagaccatccattagttaatcacccgaatgctcctagcatcgcagagcttaaccagtgtttccgccaggaaggcgtacgcttatccatttccgcgtgtaaaaaggccatcgcggaatggggtggttcagtagatgagattacacacgtggtctccacgacttgtacgaacagcgcaaatcccggtttcgaccattacgtcaccaagggtcttggacttcgctcaggcgtggaaaaaattttgttgcacgggatcgggtgttccggcggtcttgctgcaatccgcgcggcatcaaatttagcgctgggctcgtcgttccgcaaaaaaccagcccgtatcttagtactggcctgcgaaatttcgagtcttttagttcgttcggaacttgatagtatcgacaaggaacagaagactcgtatcggagtgtgtttgtttagcgactgcgcttccgcagccgtgctttcgaacggtatgggggaatacgaagtctacagcccaaaatatgaaatcttggggtggcgtcatgaaatcttagaagattcggaccaggacttgggcttcgacgtcgacccgtttgggtggaaggtcgtccttactcctcgtgtcccgagcatggctagcgcggccgtgagtcccgcgttccaggaccttatcaaatctcttcctgagttacaccaagatggccgtttgcctaccgctgcggatttcgactgggcattgcatcctggtggtagcaccattattaccggcgtcgaacaagcaatgaatcttacacaagaccaccttcgcgcatcttatgaaatctatgtcaactacgggaatagtagttccgccaccattatgtctgtaatggataaattgcgcgacatgtctgagggacgtgagtatgtggtagcatgtgcttttggcccaggcatctcgctggaaatgatgattttgcgccgcccgcgtacgatcgttgacggcctgccgactgaagatgtagactga

SEQ ID NO: 205 - DNA, 1374 bp, Artificial Sequence
  PKS69
atggcttctccaaaccgttttggacagttaggtttgtcaatcctgggggttggatcccaatatcctcctcataaccttaaaccagatgcgattgacaccttagctactcgtttttacccagactctccgtcaatgaagaaaatgcgcgccatcaaccagttcacaggtatcgatactcgctcatcaatcggtaatccagatcatcccgtcgttaatttccctggccctcctagcattgcccaacttcacgaggtctttatgtcagccggtgtgccgcttgccgtgtcagcggctcgtaaagcgattgcagaggctaagattgaccttaatgaaattacccatgtagtctccactacttgtactgattctgcaaacccgggctacgatcactttgtctgtgagaaattaggtgtatccaatcaagtggagcgtgttttgctgcacggagtcggatgtgcggggggactgactgcgttacgtactgctgcaaacttagcacttggtcatacgtttcgtggaaagcccgcacgtatcttagtcctggcccttgaagtaagtacgactatggtgcgttcggagttagaatctatcgataagttgcaagagactcgcattggagtatgcctttttagtgacggggcaagtgccgtggtgttatctaacggcttaggcaaagcgagcggtccaccggtgtatgattacttgggttgggacaaccgcatcattcccgacacgacctcagatttggggttcgatgtggaccctgtcggatggaaagttatcttaactccacgcgttccaaaaatcgcccaaggtgctctgcaggagacgtttagtgatttgatgtcctctttaagtctgccacctccgtgggatgacgctaagcctagtgatttcgattgggccatgcatccgggtggtgctactattttatcgggggctgagaaagcacttggtttagtgccggagcacatgcgtgctagctacgacacgtatattaatcatggcaacagtagtagcgcgaccatcttcagtgtcctggaccgcctgcgttctaaggatatggacgcatgcactcctgacggtcgcggccccaaagaccatatcgttggttgtgcgtttggcccgggcgtcgccgtggagatgtgtatgttgaagcgtcatttcccaccaggggctgaaggaacagggcttcaaactcccccagaaacagagtccgaggaatcgtctgagcgttccgacgacggtgaagcgtcggttcgttctgacgaccttgacgtggaggacgaagcggccgctgtccatacacgccgcgcagacgcgggcgtcgatagcttcattgcccaagcgatctctagtgtcgagctggattga

SEQ ID NO: 206 - DNA, 1338 bp, Artificial Sequence
  PKS70
atggcggccagtaccgtcgcgggcgaattaggtcttagcattacaggtttgggggttcaatacccgccctactccctggggccggatgcgatcgacatcttatcgaagcgctatcatcccgaaagcccggcaatgaaaaaagtcttagcgatcaatcgctatactggcattgaccaacgcagtagcatcggcaatcccgaccacccgctggtgaacaagcctaatcccccgacggttaaagagttacacgaagttttcatgtccgacggcgtccctcttgccgttgaagcgtcccgcaaagcaatggcagaagcgcgcttagtaccggctcaaatcacgcatatggtgtcgacaacttgtacggattccgctaatccaggttatgaccactacgtggccaaggagcttggattgagcgaccgcttagagaaggtgttgctgcatggcattgggtgctcgggcggcttagcagcattgcgcacagcggcgaacctgtgtttgggtcatacggcacgtgggaagcccgcgcgcattcttgtattagcgctggaggtgtcaacaacgatggttcgctccgaattggaatccattgatgcattacaggagacccgtatcggcattgccttatttagcgactgtgcatccgctgtgattttatccaatggtatcggggaagcaccaggtaagcccgcaatctatgaccttttggggtgggaaaatcgcgtcatccccgatagtgaacatgacctggggtttgatgtagatcccatgggctggaaagtcgtgttgagtcctcgcgttcctgtattagctaaggcctcacttcagcctacatacgcagacctgttgagttctttgcaagaccagcttccttccagctaccagaagcccgccgattttgattgggcaatgcatcctggaggagctaccatcttatcaggggcagagtcagcgatggggttaactcctgagcacatgcgcgccagctacgatcgttatatcaaccacggtaactcatcatccgcgactattttttccgttctgaaccgtttgcgtgagaaggacatggatgcattagcgcccggtggaaaagtcaaggaatacgtcgtaggctgtgcatttgggcctggcattaatgtagagatgtgcatgttaaagcgccgtatgaatgcccccgcgcgcacgactacgggattagacacaccaccagaaactgacgatagtgagggaccaggcccgggaagttctgcgggctctgatgacggcgaaagcattgaagggggtgagaaagaggaaaagttcatcaatgaggcattggacaacgtcgaattagactga

SEQ ID NO: 207 - DNA, 1416 bp, Artificial Sequence
  PKS71
atggccagtgcatcaaaaatccataatgggactaatcatcagtttagtgagctgaacttagcgatcacaggtatgggtgtcgagtatccaccctatctgttggatccaaagtgtctggacaccatttgcgagcgccactaccctgcatcgcccgctattgcaaaaatccgtatgattaacaattacaccgggattgatactcgttccgctatcgggaccgttgatcatccaatggccaatatggaacgcgctcccaccattaatcagttgtgtgacatttttcttaaagacggtgtcgctcttagcgttacagcagctcgtaaggccctgcacgaggctcagattagtgccttagatatcacacatgttgtttccacaacgtgcacgaactcggccaaccctgggttcgatcattatgtgtgcaagggtctgggaattacccagccagttgagaaggtgttgcttcacggaattgggtgttcaggaggtttagcgagtctgcgcactgctgcaaatctggcgttgggttcctcattccgtggacgcaaagctcgcgtcctggtaattgcgcttgagatctcgagtcttctggtgcgcagcgagttggatagtatccacgagtcgcaggagacacgcatcggcgtgaccctgttttcggattgcgcctccgcactgatcttatctaacgggctgggggaagaacacgcggagcccgtgtatgagcttcttgggtgggatcatcgcattatcccagacacagagcaagacttggggttcgatgtcgaccccttaggttggaaagtggttctgagccctcgcgtgcctaagttggcggcaagtgtggtagagcccgcgtttaatgaccttctggcaaccttacccaatctgccgccagaataccagacggcgcgcgactttgattgggcgctgcatcctggcggggcgactattcttagcggggttgaacgcgcgatgaatattagtgcagaacatatgcgtgcatcgtacgacacttatatcaaacatggaaattccagcagcgccactgtaatctcggtcttggaccgccttcgtcagaaggatatggatgagttggcgccaggtggaaccgtaaaggactatgtagtggggtgtgcctttggaccagggatcgccattgaaatgtgcatgcttaagcgcaacatgcatcatgtccgtaagacgttgttcccaagcggtgaggccacaccaccggaaactgaaagcgagggcggtcgcagtaagtcagaatcagaaggggaagaattagacgctgaacgtaaggaggcgacagaacaaggcgagcagtcaagtgaaaaggtgagcggtgcgcgcccaggcggtccccgccagggtgatagcctgtcagaggcgttgaatggagtggatcttgactga

SEQ ID NO: 208 - protein, 405 aa, Artificial Sequence
  PKS02
MAPPSGESISASAEEPIALSVLPRGQPRAEGPASVLGIGTAVPPTEFLQSEYPDFFFEVTKCSEKEALKAKFKRICDKSGIRKRYLFLTKEVLEANPGIATYMEPSLNVRHDIVVVQVPKLAAEAAVKAIKEWGGRKSEITHIVFATTSGVNMPGADHAMAKLLGLKPTVKRVMLYQTGCFGGATVLRVAKDLAENNKNARVLAVCSEVTAVTYRAPNENHLDGLVGSALFGDGAAVFVVGADPKPEEKPLFEVHWAGETILPESDGAIDGHLTEAGLIFHLMKDVPGLISKNIEKFLSEARKCVGSPDWNDMFWAVHPGGPAILDQVEAKLKLSKDKMQGSRDVLSEFGNMSSSSVLFVLDQIRQRSMKMGASTTGEGNDFGFFIGFGPGLTLEVLVLRSMPIV

SEQ ID NO: 209 - protein, 369 aa, Artificial Sequence
  PKS03
MANIAKILAIGTANPPNYIFQADYPDFYFKISNSEHMTELKNKFRNICQKSTIKKRYMHLTGDTIKKNPNIGIYRTASLEVPKLGQEAALKAIKEWGQSISRITHLIFCTSSGISMPGADFELTKLLGLPPSVQRSIIYQSGCFAGAQSLRLAKDIAENNVESRILIVCSESMTTCFHVPSDAHLDILVGSAIFGDGAAALIVGANPDPTTEHPLFSVVSAFQTTIPDTENGIVVQTREMGLSYYLSRSVPKLISDNIPECFSQISAQFEISDWNSLFYIVHPGGPAILNGIEEKLGLVKEKLRASRHVLTEYGNMWSPSVFFVLDEMRKRSLQEGKITTGEGLKMGILVGFGPGLTMENVVLHSTAIA

SEQ ID NO: 210 - protein, 388 aa, Artificial Sequence
  PKS04
MVSVEEIRKAQRAEGPATVMAIGTATPPNCVDQSTYPDYYFRITNSDHMNELKEKFKRMCDKSMIKKRYMYLNEEILKENPSVCAYMEPSLDARQDMVVVEVPKLGKEAATKAIKEWGQPKSKITHLIFCTTSGVDMPGADYQLTKLLGLRPSVKRYMMYQQGCFAGGTVLRLAKDLAENNTGARVLVVCSEITAVTFRGPSDTHLDSLVGQALFGDGAAAVIVGSDPLPAEKPLFELVWTAQTILPDSEGAIDGHLREVGLTFHLLKDVPGLISKNIQKALVEAFQPLGIDDYNSIFWIAHPGGPAILDQVEAKLGLKPEKMEATRHVLSEYGNMSSACVLFILDQMRKKSIENGLGTTGEGLEWGVLFGFGPGLTVETVVLRSVTV

SEQ ID NO: 211 - protein, 385 aa, Artificial Sequence
  PKS05
MNKGRSAEGPAVILSIGTAVPPYVHEMGSYADYYFDETNCNHKPELKAKFKRICDKMHISKRHMVVRKELLAQYPSLGTYLNNSLEDRHKVCMEWVPKLAVEAAENAIKEWGGSLSQITHIVMATTSVVNMPGVDLLVAKALGLSPKLRRVMMYQTGCWGGAAIIRVAKDIAENNKGARVLVVASECTATFFRAPSEEYLDGLVGQALFGDGAGALVIGADPNPDTERTLYEIQWSGEMVVPDSEGAIDGHMMEAGMYYHLKPDIPKLVSRSIEEFVSDATAQAGNADVNDLFWAVHPGGVAILNQIENQLMLSPEKLLASREILADYGNMASACVLFVLDQVRNCSIKAKASTTGEGRDFGSLIGIGPGLTMECCVLKSVPLDN

SEQ ID NO: 212 - protein, 404 aa, Artificial Sequence
  PKS06
MGSSAAPANVREICRAQRADGPAAVLAIGTANPANCVPQDEFPDFYFRATKSDHLTGLKEKFKRVCQKLGVQKRYLHHTEELLSAHPEFLDHSSPSLDARLDIVKTAVPELAAQASRKAIAEWGRPAADITHLVVTTNSGAHIPGVDFRLVPLLGLRPTVRRTMLYLNGCFAGAAALRLARDLAENNSGARVLVVCAEITVLLFNGPEEGCFQTLVNQGLFGDGAGAVIVGADPLAAERPLFEIVSAAQAIIPESEDVITMHLTRGGYGGNISTRQVPVLIGDNIERCLTDAFAPLGGVIGAEWNDLFWDVHPGSSAILDQVDAVLKLKPEKLAASRRVLSEYGNMFGVTVIFVLDELRRRMEKGEEEGAPEWGVMVAFGPGLTVETMVLHRSGTPAEKKLAEA

SEQ ID NO: 213 - protein, 397 aa, Artificial Sequence
  PKS07
MTPSIEEIRNAQRADGPATVLAIGTATPAHCVLQSDYPDYYFRVTNSEHMTDLKEKFKRMCDKSYIKKRYMHLTEEILKENPKMCDYWSPSLDARQDIVVVEIPKLGKEAAVKAIKEWGQPKSKITHLVFCTTSGVDMPGADYQLTKLLGLRPHVKRLMMYQQGCFAGGTVLRLAKDLAENNRGARVLVVCSEITAVTFRGPSETHLDSMVGQALFGDGAAAVIVGADPDPVLEKPLFQLVSASQTILPDSEGAIDGHLREVGLTFHLLKDVPGLISKNIEKSLVEAFKPIGISEWNSLFWIAHPGGPAILDQVEAKLALKEEKLRSTRQVLSDYGNMSSACVLFILDEMRKKSVEEGKLTTGEGLEWGVLFGFGPGLTVETVVLHSLPTTQQAVSA

SEQ ID NO: 214 - protein, 394 aa, Artificial Sequence
  PKS09
MAASVEEICKAQRAQGPATILAIGTATPPNYIYQADYPDFYFRVTKSQHMTELKDKFKRMCDKSMIKKRHFVINEEILKENPNVCVYEAPSLDVRQDIVVVEVPKLGKEAATKAIKDWGQPKSKITHLVFCTTSGVDMPGADYQCAKLLGLRPSVNRVMLYQQGCYAGGTVLRVAKDLAENNKGARVLVVCSEITAITFRGPTDTYLDSMVGQALFGDGAGAMIIGADPDTSIERPLFQLVSAAQTILPDSEGAIDGHLREMGLTFHLLKDVPGLISKNIENSLVEAFTPIGINDWNSIFWIAHPGGPAILDQVAEKLRLKEEKLKATRHVLSEYGNMSSACVIFILDEMRRKSLKEGKATTGEGLDWGVLFGFGPGLTVETVVLHSVSALSAH

SEQ ID NO: 215 - protein, 398 aa, Artificial Sequence
  PKS11
MASSIDIAQIRNAQRAQGPATILAIGTATPSNCVYQADYPDYYFRITKSEHMVDLKEKFQRMCDKSMIRKRYMHLTEEFLKENPNLCEYMAPSLDARQDVVVVEVPKLGKEAATKAIKEWGQPKSKITHLIFCTTSGVDMPGADYQLTKLLGLRPSVKRFMMYQQGCFAGGTVLRLAKDLAENNKGARVLVVCSEITAVTFRGPNDTHLDSLVGQALFGDGAAAVIVGSDPDLTIERPLFEMVSAAQTILPDSEGAIDGHLREVGLTFHLLKDVPGLISKNIEKALTQAFSPLGITDWNSIFWIAHPGGPAILDQVELKLGLKEEKMRATRHVLSEYGNMSSACVLFIIDEMRKKSAEDGAATTGEGLDWGVLFGFGPGLTVETVVLHSLPTTMPIPT

SEQ ID NO: 216 - protein, 362 aa, Artificial Sequence
  PKS12
MQADYPDYYFRITKSEHMTELKEKFKRMCDKSNIRKRYMHLNEEILKENPAMCEYMAPSLDARQDMVVVEVPILGKEAATKAIKEWGQPKSKITHLVFCTTSGVDMPGADYQLTKLLGLRPSVKRLMMYQQGCFAGGTVLRLAKDLAENNAGARVLVVCSEITAVTFRGPSDTHLDSLVGQALFGDGAAAVIVGADPDLKVERPLFELVSAGQTILPDSDGAIDGHLREVGLTFHLLKDVPGLISKNIEKSLNEAFSPIGISDWNSLFWIAHPGGPAILDQVEIKLGLKQEKLKSTRHVLSEYGNMSSACVLFILDDMRKKSMEEGKSTYGEGLEWGVLFGFGPGLTVETVVLHSVPTVATQ

SEQ ID NO: 217 - protein, 395 aa, Artificial Sequence
  PKS13
MASVTMEQIRKAQRAEGPATILAIGTACPPNFVTQADFPDYYFRVTKSEHMTALKNKFQRICDKTMIKKRHLYLTEEHLKQNPNMCEYSAPSLDTRQDMLVVEVPKLGREAAMNAIKEWDQPKSKITHLIFCTTSGVDMPGADYQCAKLLGLSPSVKRLMLYQQGCFGGGTVLRLAKDIAENNKGARVLAVCSEIMTTSIFHGPTESHFDSMVVQALFGDGASALVVGAEPDESVGERPIFELVSAAQTIMPDSDGAIGGHLKESGLMLHLIRDVPKLISNNIEKNLIEAFREIGIRDWNSIFWIAHPGGRAILDEVEAKLRLKKEKMADSRHVLSEFGNMSSACVFFIMDELRKRSLEEGKSTTGDGLEWGVLFGFGPGVTVETVVLHSVANKV

SEQ ID NO: 218 - protein, 350 aa, Artificial Sequence
  PKS14
MVMAAGASSLDEIRKAQRADGPAGILAIGTANPENHVLQAEYPDYYFRITNSEHMTDLKEKFKRMCDKSMIRKRHMHLTEDFLKENPHMCAYMAPSLDTRQDIVVVEVPKLGKEAAVKAIKEWGQPKSKITHVVFCTTSGVDMPGADYQLTKLLGLRPSVKRLMMYQQGCFAGGTVLRIAKDLAENNRGARVLVVCSEITAVTFRGPSDTHLDSLVGQALFSDGAAALIVGSDPDTSVGEKPIFEMVSAAQTILPDSDGAIDGHLREVGLTFHLLKDVPGLISKNIVKSLDEAFKPLGISDWNSLFWIAHPGGPAILDQVELKLGLKEEKMRMTRHVLSEYGNMSSACVL

SEQ ID NO: 219 - protein, 401 aa, Artificial Sequence
  PKS15
MAGATVTVDEVRKGQRATGPATVLAIGTATPANCVYQADYPDYYFRITKSDHLTDLKEKFKRMCDKSMIRKRYMHLTEEFLSENPSMCAYMAPSLDARQDVVVTEVPKLGKAAAQKAIKEWGQPKSRITHLVFCTTSGVDMPGADYQLTKALGLRPSVNRLMMYQQGCFAGGTVLRVAKDLAENNRGARVLVVCSEITAVTFRGPSESHLDSLVGQALFGDGAAAVVVGADPDGRVERPLFQLVSAAQTILPDSEGAIDGHLREVGLTFHLLKDVPGLISKNIERALEDAFEPLGISDWNSIFWVAHPGGPAILDQVEARVGLDKARMRATRHVLSEYGNMSSACVLFILDEMRKRSAEDGQATTGEGLDWGVLFGFGPGLTVETVVLHSVPITTGAPTAA

SEQ ID NO: 220 - protein, 447 aa, Artificial Sequence
  PKS16
MAASTAPGELGLSITGLGVQYPPYSLGPDCLDILSKRYYPESPAMKKVLAINRYTGIDQRSSIGNPDHPLVNQPNSPTVDELHKVFMSDGVPLAVEASRKAMAEARVEPNQITHMVSTTCTDSANPGYDHFVAKELGLSDRLEKVLLHGIGCSGGLAALRTAANLCLGHKARGKPARILVLALEVSTIMVRSELESINALQETRIGIALFSDCASAVVLSNGIGEEPGKPAIYDLLGWENRVIPDSEHDLGFDVDPMGWKVVLSPRVPVLAKASLQPTYTDLLSSFQDQLPSSYQKPADFDWAMHPGGATILSGAESAMGLTPEHMRASYDTYINHGNSSSATIFSVLNRLREKDMDALAPDGKVKEYIVGCAFGPGINVEMCMLKRRMNCPTTTTTGLDTPPETDDSEGPGPGSSAGSEDGESIEGDKEDKKEKFISEALDNVELD

SEQ ID NO: 221 - protein, 351 aa, Artificial Sequence
  PKS18
MNEVRIVSTTKVLPPYCRDTKDILPFVDFWLSGQEERFRRKVIKIFEGAGVERRYGIMDIEEVFTATSFEEKNAIYVREVKKLGKSVLQKALKQSGWQPESLDYIITVSCTGIMIPSLDAYLVNDMGLKQEIVRLPVTEMGCAAGISGLIYAHNFLKSNPGKRLALIAVESPTATFQLNDFSMANMVSAAIFGDGAACVLLSSEENAPGPKILGEGMYHFKEATHLMGFDLTNTGLKMILDPSVPETIADHFPRIIHPFLEKHGTSIESVDHLIFHPGGRKIVQTVEELFGQLGKNIDDTREVLRKYGNMSSATVLYVLERFLEREIQQGQQGLLLSFGPGFSAQRVLLEW

SEQ ID NO: 222 - protein, 414 aa, Artificial Sequence
  PKS19
MSSAAVAMLADPTVQIALACLVVSLFVVLQSVKKSKDEQTVYPVIAGMAIGNPQYRCTQNEALAVASKCPGLESIKPVLERIYGNSRIGSRYFAVPDFTPGRAAKGDPLFYPADGSYQVPVDVRLDKFKEKAVPLVSDVARRAIKEAGLNVEDISKLVVVSSTGFLGPGLDCELIKNLGLTRSVDRTLIGFMGCAAAMNGFRNANDYVTANPGKYALMICVELSSVHTTFDDNINDAILHAIFADGCAAAVLKGARKSECPKGTLAIVDNHAWLMEGTEDGITLAIKPNGITCTLSKFLPQYIAKNIAFFADGFLKKHKLGRDDVDFWCVHPGGRRIIEEAQNGLGLSEEQTADSWAVLGEYGNMLSPSVMFVLSRVFKRHNAALAQGKPGYQTGMAFSFSPGVGAEGILLRQI

SEQ ID NO: 223 - protein, 351 aa, Artificial Sequence
  PKS21
MAVLCKPAIAVPDHIITNEETLELARRLHSDHPQLALACRLIEHTGVRKRHLIQPIDEVLKHPGLDARSATYETESKARVPSVVRRALDQAELEPDQIDLIIYVSCTGFMMPSLASWLVNTMGFRADTRQLPIAQLGCAAGGAAVNRAHDFCTAYPGTNVLIVACEFCSLCYQPTDLGIGSLLSNGLFGDGIAAAVVRGEEGTGMRLERNGTYLIPHTEEWISYAVRSTGFHFQLDKRVPGTMEPLSPALRALAEQHQWNAGKLDFYIIHAGGPRILDDLSRFLDVPPGAFRHSRATLTEYGNIASAVVLDALGRLFDEQSALDGHHGMLAGFGPGIIAEMSLGTWVSPES

SEQ ID NO: 224 - protein, 355 aa, Artificial Sequence
  PKS23
MPRLCKPSVRVPEYVITAEETLDFAERVHAGKPQLPLALRLIRNTGVQKRHIVQPIEQTLKHPGLTERNRIYEAESKKRTPEVVEEALSNAGVTARDIDAIIYVSCTGFLMPSLTAWLINQLGFRSDTRQIPIAQLGCAAGGAAINRAHDFCLAHPGSNVLIVSCELCSLCYQPDMDDIGSLLSDGLFGDAVAAAVVRGIGGTGIELEANSSYLIPHTEDWISYAVRDTGFHFQLDRRVPGTMEPLAPVLREFAAGHRWDASNLDFYIVHAGGPRILNDLAKFLDVDRKVFRHSWATLTEYGNIASAVVLDAALRLFEEDTPMPDATGLIAGFGPGITAEMALGRWSSDTPPATG

SEQ ID NO: 225 - protein, 353 aa, Artificial Sequence
  PKS24
MSVIAGVFGALPPHRYSQSEITDSFVEFPGLKEHEEIIRRLHAAAKVNGRHLVLPLQQYPSLTDFGDANEIFIEKAVDLGVEALLGALDDANLRPSDIDMIATATVTGVAVPSLDARIAGRLGLRPDVRRMPLFGLGCVAGAAGVARLRDYLRGAPDDVAVLVSVELCSLTYPAVKPTVSSLVGTALFGDGAAAVVAVGDRRAEQVRAGGPDILDSRSSLYPDSLHIMGWDIGSHGLRLRLSPDLTNLVERYLANDVTNFLDAHRLTKDDIGAWVSHPGGPKVIDAVAKSLALPPEALELTWRSLGEIGNLSSASILHILRDTNEKRPPSGSAGLMLAMGPGFCTELVLLRWR

SEQ ID NO: 226 - protein, 365 aa, Artificial Sequence
  PKS28
MAVLCRPAVAVPPHVITMEETLDLARSTHAGHDQLGLVLRLIRNTGVATRHLVQPIGETLAHPGFEARNKVYEREAKARVPQVVHQALAEAELTAQDIDLIVYVSCTGFMMPSMTAWMINSLGFRSDTRQLPIAQLGCAAGGAAVNRAHDFTRAYPGSNVLIVACEFCSLLYQPTDLGVGSLLSNGLFGDAVAAVVVRGEGGTGLSLERNGSHLVPDTEEWISYAVRETGFHFQLDKRVPGTMSMLAPALTALSAQHSWNVGELDFYIIHAGGPRILDDLCTHLELPSEMFAQSRATLTERGNIASCVVLDALDRYFASGKATEGARGMLAGFGPGITAEISLGTWATGEGRPAALTGAEARRPA

SEQ ID NO: 227 - protein, 348 aa, Artificial Sequence
  PKS29
MATLCRPAVAVPDHVITREETLQLARELHAGHPQLDLVLRLIENTGVRTRHLVQPLGETLRHPGFEERNRVYEAEAKARVPRVVDRALAQAEVVPDDIDLIVYVSCTGFMMPSLTAYLINSMHFRPETRQLPIAQLGCAAGGAAINRAHDFCTAYPGSNVLIVSCEFCSLCYQPTDLAVGSLLSNGLFGDAVSAVVIRGEGGIGMNIERNSSHLVPDTEDWISYAVRETGFHFLLDKRVPGTMRMLAPAVHALVQHHEWDVTGLDFAIVHAGGPRILDDLSHYLGLAGEMFRFSRATLTERGNIASSVVFDALDRMFAEGTAVDTARGLVAGFGPGITAEIAVGRWHT

SEQ ID NO: 228 - protein, 386 aa, Artificial Sequence
  PKS30
MEIGAGRAAIIGIGTALPPFRMDQGETAARIAEALQEHPDSMRWAKRIFKQCGVDSRYTCLPELLEPAAGCRYSPGTPADAVPTTAERMAVYRREAVPLGLEAARSALADAGVEPAGITHLITVSCTGQFLPGLDAVITESLGLSRRVQRIPFNFLGCAAGLKGVCLAQHLIRLDSAARVLVVCVELCTLHMQSSAKREDLYAASFFGDGASACVVAGSSGSKADRSMFLLGDDRSVLMPEYAEEMVWEVGNHGFNLYLSPSIPRRIEELIPPQIEGWFADEPLPKLWAIHPGGKGIVDAVQASFGLSDEQVDPSRTVLMRYGNLSSATILFVLQQMRSQLIERDIRAEEGIAMAFGPGLTAELLRFRYVSGEAVVPEERVEDAYV

SEQ ID NO: 229 - protein, 366 aa, Artificial Sequence
  PKS32
MTAIVEPAEELSVFTGLTEITRFAGVGTAVSASSYSQSELLEILDVEDPKIRSVFLNSAIDRRFLTLPPESPGGGRVSEPQGDLLDKHKKIAVDMGCRALEACLKSAGATLSDLRHLCCVTSTGFLTPGLSALIIRELGIDPHCSRSDIVGMGCNAGLNALNVVAGWSAAHPGELGVVLCSEACSAAYALDGTMRTAVVNSLFGDGSAALAVISGDGRVPGPRVLKFASYIITDAVEAMRYDWDRDQDRFSFFLDPQIPYVVGAHAEIVIDRLLSGTGLRRSDIGHWLVHSGGKKVIDAVVVNLGLSRYDVRHTTGVLRDYGNLSSGSFLFSYERLADEDVARPGEYGVLMTMGPGSTIEMALIQW

SEQ ID NO: 230 - protein, 343 aa, Artificial Sequence
  PKS34
MDIRHFMEGVFALDPVERRKLAYLYQHSGIDNRYSVIPDYSLPPAAWQFYSPEESLEPFPDISKRMDWYKRYAAGLSVAAINNCLQDQCLRQECVTHLITVSCTGMSAPGLDVELVELLGFPRSTKRSSINFMGCYAAIHALRQGDQICRAERDARVLIVCTELCTLHFQKTPSPDNIAASLLFGDGSAAVLLGNGEGGLATIRDFYAEFLPSGKKDMCWEITPYGFAMTLSGYIPELIRADFRPLVDRALENAGWVAAQVDDWCIHPGGKRILQAVAHCLDLPDAQLEDAYGVLREFGNMSSPTVLFVLSRMLAKGTGGKTLMAAFGPGLCIETCCLEAVVS

SEQ ID NO: 231 - protein, 406 aa, Artificial Sequence
  PKS35
MTVRMLSIETVVPETVIRQEDVTRLFAGQPGMTRLGSRLVRSAFDGAGVATRHTVLPELAEATARASHAPTAGPEDDRERGQLTPPRTPHGEPPGDDAAASPFVDPVTGHLLSPGTHARNQIYTRNARELFVAAGRAALSGVGPGITAADVTHVVTVSCTGFFAPGPDVRVAKDLGLPADVKRVHLGFMGCNAAFPALQTAATACRADPDAVVLVVCVELCTLHLHVRNDPDTVMGNALFADGAAAAVVTARDVAVPGAALELVDFETTLAPVGEDELAWSVGDEGFEMILGTYVPRIIDDHVTDALAPLLRRTGLAVEDIPQWAVHPGGRSILDKVESRLGLSAEQMAPSRAVLRDAGNMSSVTILFVLARLLHTGMSGHVAAMAFGPGLSIESALLRLLPAAQR

SEQ ID NO: 232 - protein, 331 aa, Artificial Sequence
  PKS36
MKEKLERLCKNTTVKRRFTVMSKEILEKYPELATEGSPTIKQRLDIANAAVLEMAVEASRACMAEWKRAAGDITHIVYVSSSEIRLPGGDLYLADQLGLRSNVGRVMLYFLGCYGGVAGLRVAKDIAENNPGSRVLLTTSETTILGFRPPNMARPYDLVGAALFGDGAAAVVIGADPVEGTETPFMELDYAVQQFLPGTHNIIDGRISEEGISFKLGRDLPQMIEGHIEGFCRMLMANAGLQDFNELFWAVHPGGPAILNRLESSLGLRPEKLQCSRRALMDYGNASSNTVFYVMDYVREELRREGGEEWGLVLAFGPGITFEGILVRSLK

SEQ ID NO: 233 - protein, 349 aa, Artificial Sequence
  PKS37
MAVPVIAGLGTAHPPSAAQDELWEGFFSKHFSGTTRALAQRIFANSGVTRRQAAVNPLLEDVSDWPTERRMRRYQVEALPLGKEAVGRALTAAGLAAGDIGLFVVCSCTGYATPGLDILLARDLGMAPDTQRVFVGHMGCYAALPGLGAASDFVTARGRPALLLCAELTSLHIQPSTARVDTQQIVSHALFSDAAVAAVVVPGGRGYALREVTSVTDTSTADHMTWDVTDTGFRMGLSPKVPQVLSRHVRGLVDDLLARHGGTTAEVDGWAVHPGGPRILNVVERELSLPPEGLAASRATLDEHGNCSSPTVLLILDRLFRAAAPPRRVVMLAFGPGLTLYAALLDRQD

SEQ ID NO: 234 - protein, 389 aa, Artificial Sequence
  PKS38
MVSVAEIRKAQRAEGPATVLAIGTATPSNCVVQSEYPDFYFRITNSEHKTELKEKFKRMCDKSMIKKRYMHLTEEILKENPSMCEYMAPSLDARQDMVVVEVPKLGKEAATKAIKEWGQPKSKITHLIFCTTSGVDMPGADYQLTKLLGLRPSVKRYMMYQQGCLAGGTVLRLAKDLAENNKGARVLVVCSEITAVTFRGPTDTHLDSLVGQALFGDGAAAVIVGSDPLPEIEKPLFELVWTAQTILPDSEGAIDGHLREVGLTFHLLKDVPGLISKNIEKALVEAFQPLGISDYNSIFWIAHPGGPAILDQVEVKLGLKPEKMQATRHVLSEYGNMSSACVLFILDEMRRKSKENGLATTGEGLEWGVLFGFGPGLTVETVVLRSVAA

SEQ ID NO: 235 - protein, 392 aa, Artificial Sequence
  PKS39
MASVEEIRNAQRAKGPATILAIGTATPDHCVYQSDYADYYFRVTKSEHMTELKKKFNRICDKSMIKKRYIHLTEEMLEEHPNIGAYMAPSLNIRQEIITAEVPKLGKEAALKALKEWGQPKSKITHLVFCTTSGVEMPGADYKLANLLGLETSVRRVMLYHQGCYAGGTVLRTAKDLAENNAGARVLVVCSEITVVTFRGPSEDALDSLVGQALFGDGSAAVIVGSDPDVLIERPLFQLVSAAQTFIPNSAGAIAGNLREVGLTFHLWPNVPTLISENVEKCLTQAFDPLGISDWNSLFWIAHPGGPAILDAVEAKLNLDKKKLEATRHVLSEYGNMSSACVLFILDEMRKKSHKGEKATTGEGLEWGVLFGFGPGLTIETVVLHSIPMVTN

SEQ ID NO: 236 - protein, 391 aa, Artificial Sequence
  PKS40
MAPEESKHAETANRATATVLAIGTANPPNCYYQADFPDFYFRVTNSDHLTHLKNKFKSICERSKIEKRYLHLTEEILKENPNIASYEAPSLDVRQNIQVKEVVKLGKEAALKAINEWGQPKSKITHLIVCCIAGVDMPGADYQLTKVLGLQLSVKRFMFYHLGCYAGGTVLCLAKDIAENNKGARVLIVCSEMTPICFRGPSETHIDSMVGQAIFGDGAAAVIVGAHPDLSIERPIFELISTSQTIIPESDGAIEGHLLEVGLSFHLHQTVPSLISNSIQTCLSKAFTPLNISDWNSLFWIAHPGGRAILDDIEATVGLKKEKLMATRQVLNDYGNMSSACVFFIMDEMRKKSIANGQVTTGEGLKWGVLFGFGPGVTVETVVLHSVPLIT

SEQ ID NO: 237 - protein, 389 aa, Artificial Sequence
  PKS41
MVSVSGIRNVERAEGPATVLAIGTANPSNCVDQSTYADYYFRVTNSEHMTDLKKKFQRICERTQIKNRHMYLTEEILKENPNICAYKAPSLDAREDMMIREVPRVGKEAATKAIKEWGQPMSKITHLIFCTTSGVALPGVDYELIVLLGLDPCVKRYMMYHQGCFAGGTVLRLAKDLAENNKDARVLIVCSENTAVTFRGPSETDMDSLVGQALFADGAAAIIIGSDPVPEVEKPLFEIVSTDQKLVPGSHGAIGGLLREVGLTFYLNKSVPDIISQNINDALSKAFDPLGISDYNSIFWIAHPGGRAILDQVEQKVNLKPEKMKATRDVLSNYGNMSSACVFFIMDLMRKKSLEEGLKTTGEGLDWGVLFGFGPGLTIETVVLRSVAI

SEQ ID NO: 238 - protein, 360 aa, Artificial Sequence
  PKS42
MPKIISISTYQPPYTLQQDNAEELTKELFYAKIPKLERYLKVFENGGIDTRHFCVPAEWHRTNHSFEERNNLYIELATQYSVSVIQACLANTAFLSSSIPTEDIDAIIFVSSTGISTPSIDARVMNKLPFSDRLKRIPLWGLGCAGGAAGVSRAYDFCKAHPHAKVLVVCVELCSLTFQPNDFSKSNLIGASLFADGAACILVCGDEVAIAAKRPTPNILATGSKWMPDSENVMGWDVKNNGLHVIFQKSIPSIITNWLGPFIEQFLMDQELYSEQLTHFIAHPGGKKVLKAYEDTLYLSPQKTDISREILRQHGNMSSPTVLYVLEQFMLHEGQVEDTGLLVALGPGFCAEAVLLNWRE

SEQ ID NO: 239 - protein, 390 aa, Artificial Sequence
  PKS43
MVSVSEIRKAQRAEGPATVMAIGTATPPNCVDQSEYPDYYFRITQSEHMTELKEKFKRMCDKSMITKRYMHVTEDILKENPNMCAYMAPSLDARQDMVVVEVPKLGKEAATKAIKEWGQPKSKITHLIFCTTSGVDMPGADYQLTKLLGLRPYVKRYMMYQQGCFAGGTVLRLAKDLAENNKGARVLVVCSEITAVTFRGPSDTHLDSLVGQALFGDGAAAVIVGSDPLPEIEEPLFELVWTAQTILPDSEGAIDGHLREVGLTFHLLKDVPGLISKDIEKALVEAFQPLGISDYNSIFWIAHPGGPAILDQVEAKLELKPEKMRATRHVLSEYGNMSSACVLFILDEMRRKSIEDGLKTTGEGLDWGVLFGFGPGLTVETVVLRSVGVN

SEQ ID NO: 240 - protein, 393 aa, Artificial Sequence
  PKS44
MASVEEIRNAQRAQGPATILAIGTATPAHCINQAEYPDYYFRITNSEHKTELKEKFKRMCDKSMINKRYMYLTEEILKENPNMCEYMAPSLDARQDMVVVEIPKLGKEAATKAIKEWGQPKSKITHLVFCTTSGVDMPGADYQLTKLLGLRPSVKRLMMYQQGCFAGGTVLRLAKDLAENNKGPRVLVVCSEITAVTFRGPSDTHLDSLVGQALFGDGAAAVIVGADPDVKIERPLFQIVSAGQTILPDSDGAIDGHLREVGLTFHLLKDVPGLISKNIEKSLVEAFKPIGINDWNSILWIAHPGGPAILDQVELKLGLKEEKLKNTRHVLSEYGNMSSACVLFILDETRKRSLEEGKATTGEGLDWGVLFGFGPGLTVETVVLHSVPAITNQ

SEQ ID NO: 241 - protein, 362 aa, Artificial Sequence
  PKS45
MASIVSVGLCTPPYRISQEKTVEFARELFQDSFHEIERLLKVFENGQIKERYFSVPLEWFSKDHSFAEKNEIFIEKAVEFGISAIKECLHNPTYLQKPIPFEDIDAIFYITSSGLATPSIDAKIMNQLLFRKSCKRIPIWGLGCAGGASGLSRAFEYCKAFPKAKVLVLSVELCSLTFQKDDHSKSNLVGTSLFADGVACALITGSEADLSLKDSSIALPRILATQSMLMSDSEDVMGWSIRKEGFFVIFSKDIPTIIRTWVKSNVQNFLDEQELTIQDIEHFVAHPGGKKVLEAYVETLGMGQEKINNSLEILTNYGNMSSATILYVLKKFLENSSKKGDLGLAAAVGPGFSSELLLLRWE

SEQ ID NO: 242 - protein, 390 aa, Artificial Sequence
  PKS46
MVTVEEVRKAQRAEGPATVMAIGTAVPPNCVDQATYPDYYFRITNSEHKAELKEKFQRMCDKSQIKKRYMYLNEEVLKENPNMCAYMAPSLDARQDIVVVEVPKLGKEAAVKAIKEWGQPKSKITHLVFCTTSGVDMPGADYQLTKLLGLRPSVKRLMMYQQGCFAGGTVLRLAKDLAENNKGARVLVVCSEITAVTFRGPTDTHLDSLVGQALFGDGAAAIIIGSDPIPEVEKPLFELVSAAQTILPDSEGAIDGHLREVGLTFHLLKDVPGLISKNVEKSLTEAFKPLGISDWNSLFWIAHPGGPAILDQVEAKLSLKPEKLRATRHVLSEYGNMSSACVLFILDEMRRKSKEDGLKTTGEGIEWGVLFGFGPGLTVETVVLHSLAIN

SEQ ID NO: 243 - protein, 362 aa, Artificial Sequence
  PKS50
MTTTIARINRIGTANPPFEVHDAFLRFVISGIADERTRQVFERMAARSGIERRFSFLEPVTLQDGTVTDTEGFYGSGPWPSTGSRMERYERDAPRLALDAIAALGLDIAREGITHLIVASCTGFMAPGLDQAIVAGAGLDPGVERTVVGFMGCYAAVNSLRLAHHIVRSEPAARVLVVTLELCSIHFQRSDDLPSLLAMLLFGDGAAAALVTAEGGGIALQDFRAVTIPDTATAITWNIRDQGFDMHLGGEVPARIAAALASEAKRGDEHGLLRGGSPDDFALWAVHAGGRTVLDAVEQGFGLGAEALAPSRSVLRDRGNMSSATLMFILAQMLSSGAQGPGLALAFGPGMAAESFRFTIED

SEQ ID NO: 244 - protein, 392 aa, Artificial Sequence
  PKS51
MLATGRVAKQKEIAQSTRRVANQGKATVLALGKAFPSNVVSQENLVEEYLREIKCDDPSIKEKLQHLCKTTTVKTRYTVMSSETMKKYPELATEGSPTIKQRLEIANEAVVQMAYEASLACIKEWGRGVEDITHLVYVSSSEFRLPGGDLYLSAQLGLSNEVQRVMFYFLGCYGGVSGMRVAKDIAENNPGSRVLLTTSETMVLGFRPPNKARPYDLVGAALFGDGAAALIIGADPTESESPFMELHYALQQFLPGTQGVIDGRLSEEGISFKLGRELPQKIEDNIEEFCKKLVAKAGSGSLELNDLFWAVHPGGPAILNGLETKLKLKPEKLECSRQALVDYGNASSNTIFYIMDKVRGELEKKGRGGEEWGLGLAFGPGITFEGFLMRSL

SEQ ID NO: 245 - protein, 392 aa, Artificial Sequence
  PKS52
MANLDEIRQSQRAEGPATVLAIGTATPANMIYQSEYPDYYFRITKSEHMTELKEKFKRMCDKSMIRKRYMHLNEEILTENPNMCAYMAPSLDARQDMVVVEVPKLGKEAAVKAIKEWGQPKSKITHLVFCTTSGVDMPGADYQLTKLLGLRPSVNRLMMYQQGCFAGGTVLRLAKDLAENNKSARVLVVCSEITAVTFRGPNDSHLDSLVGQALFGDGAAAIIIGADPDLAVERPLFQLVSASQTILPDSEGAIDGHLREVGLTFHLLKDVPGLISKNIEKSLTGAFQPLGISDWNSIFWIAHPGGPAILDQVEERLALRKEKMKATRHVLSEYGNMSSACVLFILDEMRKKSVEEGKATTGEGLEWGVLFGFGPGLTVETVVLHSLPIVAA

SEQ ID NO: 246 - protein, 390 aa, Artificial Sequence
  PKS53
MVTIDEIRKAQRADGPATILAIGTANPQNCIEQSTYPDYYFRVTNSEHMVELKQKFKRMCEKSMIKKRYMYLTEEILKQNPNLCAYMAPSLDARQDMVVVEVPRLGKEAAVKAIKEWGQPKSKITHLVFCTTSGVDMPGADYQLTKLLGLRPSVKRLMMYQQGCFAGGTVLRLAKDLAENNRGARVLVVCSEITAVTFRGPTDTHLDSLVGQALFGDGAAAMIIGADPVENVERPIFKLVSAAQTLCPDSEGAIDGHLREVGLTFHLLKDVPGIISKNIERCLDDAFKPLGISDWNSLFWIAHPGGPAILDQVEEKLKLKEEKMRATREVLSEYGNMSSACVVFILDEMRKRSAAQGKGTTGEGLEWGVLFGFGPGLTVETVVLHSVATS

SEQ ID NO: 247 - protein, 392 aa, Artificial Sequence
  PKS55
MAPSVEQIGKAQRAEGPATVLAIGTATPPNCVSQADYPDYYFRVTNSEHMTDLKEKFRRMCDKSMIEKRYMYLTEEILKENPNMCAYMEKSLDSRQDIVVTEVPRLGKEAAQKAIKEWGQAKSKITHVIMCTTSGVDMPGADYQLTKLLGLRPSVKRFMMYQQGCFAGGTVLRLAKDLAENNKGARVLVVCSEITAVCFRGPTDTHLDSMVGQALFGDGAGAVIIGADPDLSIEKPIFELVWTAQTILPDSEGAIDGHLREVGLTFHPLKDVPGLISKNIDKSLKEAFSPLNIDDWNSLFWIAHPGGPAILDQVEAKLGLKQEKLKATRQVLNDYGNMSSACVLFIMDEMRKKSVENGHATTGEGLDWGVLFGFGPGLTVETVVLHSVPVAH

SEQ ID NO: 248 - protein, 349 aa, Artificial Sequence
  PKS59
MSTLCLPHVMFPQHKITQQQMVDHLENLHADHPRMALAKRMIANTEVNERHLVLPIDELAVHTGFTHRSIVYEREARQMSSAAARQAIENAGLQISDIRMVIVTSCTGFMMPSLTAHLINDLALPTSTVQLPIAQLGCVAGAAAINRANDFARLDARNHVLIVSLEFSSLCYQPDDTKLHAFISAALFGDAVSACVLRADDQAGGFKIKKTESYFLPKSEHYIKYDVKDTGFHFTLDKAVMNSIKDVAPVMERLNYESFEQNCAHNDFFIFHTGGRKILDELVMHLDLASNRVSQSRSSLSEAGNIASVVVFDVLKRQFDSNLNRGDIGLLAAFGPGFTAEMAVGEWTA

SEQ ID NO: 249 - protein, 393 aa, Artificial Sequence
  PKS60
MAPSVQEIRKAQRAEGPATVLAIGTATPPNCIYQADYPDYYFRVTNSEHMTDLKEKFRRMCDKSMIEKRYMHLTEEILKENQNMCAYMASSLDSRQDMVVSEVPRLGKEAAQKAIKEWGQPKSKITHVIMCTTSGVDMPGADYQLTKLLGLRPSVKRFMMYQQGCFAGGTALRLAKDLAENTKGARVLVVCSEITAICFRGPTDTHLDSMVGQALFGDGAGAVIIGADPDLSIERPIFELVWTAQTILPDSEGAIDGHLREVGLTFHLLKDVPGLISKNIEKSLTEAFSPLNISDWNSLFWIAHPGGPAILDQVEAKLGLKEEKLKATRQVLNDYGNMSSACVLFIMDEMRKKSLENGHATTGEGLDWGVLFGFGPGLTVETVVLHSVPVAHH

SEQ ID NO: 250 - protein, 447 aa, Artificial Sequence; identical to SEQ ID NO: 220
  PKS62

SEQ ID NO: 251 - protein, 453 aa, Artificial Sequence
  PKS63
MAAPSTFGELGLSIIGLSAEYPPHSLDYTCLNTLGDRFYPDTPSMKKVLGINRYTGIDTRSSIGTPDHPAVNKKEAPSIAELHSIFQSDGVPLAIRAARKAIDEAKIDTRFITHIVATTCTDSANPGFDHFVAKGLGITHGVEKVLLHGVGCSGGLATLRTGANLALGHKARGLPARVLRVALEVSTTMVRSELDSINELQETRIGACLFSDCGSAVVLSNGIGEPSEPVYDLLGWDHRTIPDTEDDLGFDVDPVGWKVILTPRVPKLTAASIGPAFTDLKASLPQLPPDYQKAADFDWAMHPGGATILSGAEKVMDITPEHQRASYDTYINHGNSSSATIFSVMDRLRSKEMDAVAPDGRVRDYVVGCAFGPGITVEMCMLKRNMTPRTGITGLQTPPETPAETETEPSEAGDGGEWDTENSGSPAERNSVSESQDQYTKFIAESLESLDLD

SEQ ID NO: 252 - protein, 433 aa, Artificial Sequence
  PKS64
MEDLQLSILGLGVQYPAYSLPPSAISDLARRHYGDSPAMTRVLHVNEKTGITTRSSVVEMSESLLNQPTPPTIAEIHQQYMAKGLPLATSACRKALAEASLGPSDITHIVATTCTDSANPGYDHFVAEELALPSNVERVLLHGVGCAGGLAVLRTAANLALGHSFRGKPARVLCVALELNTTLVRSELDSIHGLQQSRIGVCLFSDCASAVVLSNGVGGRHERPVYSLMGWNHRRLPGTDQELGFDVDPQGWKVILTPKVPGLTAGALPSSFADLVRDAARQLPPGYREAADFDWAIHPGGAKILENAAKGLGISREHMWASQDVYENHGNSSSATIFSVLDRLRQGKDEAGRSHGGRKEGRGGRQFVVGCAFGPGITVETCMLQRHRSTSRVPKGHDDVSPPESKAEAGSSGPRRRRIFRGSLWRKVQSLCC

SEQ ID NO: 253 - protein, 408 aa, Artificial Sequence
  PKS65
MSPAKLATAAQASFPDTDLHIMGIAAEYPEHICSTQDFKEFCLRNYPRTPALEKLLMVHENTGIETRRTACHFTDPFLNGTSPTIDQLSDFYLKYGVELAVGASRKAIEEWGGDVSEITHVVATTCTNSANPGYDYFVARELGLGDRVERTLLHGVGCAGGLTALRTAANIALGASFMQRPARILVIACELSSLLVRSELDSMQETGELRIGVSIFSDGASAVLLSNGIGESPDAKPVYDLLGWDHLTVPETHAEIGFDVHPAGWKVILTPKVPAITATGAPPVFASLVPRIPALLTDGVAPGAADFDWALHPGGAKVLTSVQKVLGLTTQHLRASYETYRTKGNSSSATIFSVMNRLRQPDMGEGRKNVVACAFGPGVAIEMAILKRVKDVAPHADVAASSGSSDSG

SEQ ID NO: 254 - protein, 455 aa, Artificial Sequence
  PKS66
MSVSTEARELGLSILGLGTRYPPYTLDSRAVEELSKRYHPETPAMQKVLAINRFTGIDKRSSIGRPDHWLVNQPEPPTIAQLHDVFMSDGVPLAVSASKEALAEAHINDVSQITHMVSATCTDSANPGYDHYVAKALGLSPFVEKTLLHGVGCSGGLAALRTAANLCLGHSMRGLPARILVVALEISTTLVRSELESIHSNQETRIGICLFSDCASAVVVSNDIPFSPTEPLPPPVYSLLDWRHQTVPDTEQDLGFDTHPQGWKVVLSPRVPNLTASVLEPTYNSLMSGKKLPEGYGSPKDFDWAMHPGGATILMGAEKVLGIQPEHMRASYDTYVNHGNSSSATIFSVLNRLRGKEMDGVAPGGRGARELVVGCAFGPGITVEMCLLRRNLSRTEGGRKGMETPPETEESSEDGEGGREVSEEEKKGSEVSEEEKKGSEEEAFIAKALESVELD

SEQ ID NO: 255 - protein, 430 aa, Artificial Sequence
  PKS67
MVHNGKPEGVYITGLAHEYPQFSVKQDQFQGLLEKLYPGHSNVKGLQKLVALNNKTNILSRPTVHDYTQWTKEDTEPPTIDSISRVFRAVSGDIATSACNKAIKEAGLAPNDITHVVAVTCTDQGNPGYDLFVCQKLGLRPEVQRVLLQGVGCAGGLSALRTAAGIVAASSQKHRPARVLVMTCELCSLFLRAELQAAIRDGDSLHVAPALFSDAAAALVVCNGDALGEAQKPIFELEEYGSMAVPGTSGYMSYDIEKNGMIARITKDVPKAAVSAIIPMFKQLQSASSSSHGHGFPAHYSPLSTFDWAIHPGGAAILEGAKQALQLTDDHIKASLDVYRNYGNSSSSTVLIVLDKLRNMGKGRDKVVATSFGPGLSIEMCILKRSRHSLGSVFTMVQRHSKICAVWLSLISKLSRGVSRREPAVKKMDE

SEQ ID NO: 256 - protein, 403 aa, Artificial Sequence
  PKS68
MSPSALNGSTSHDRFENNLNLSIVGLGTEYPPFQLGPEALETLAQRFYPPSTALSKVLSINRFTGIDTRAAIGTVDHPLVNHPNAPSIAELNQCFRQEGVRLSISACKKAIAEWGGSVDEITHVVSTTCTNSANPGFDHYVTKGLGLRSGVEKILLHGIGCSGGLAAIRAASNLALGSSFRKKPARILVLACEISSLLVRSELDSIDKEQKTRIGVCLFSDCASAAVLSNGMGEYEVYSPKYEILGWRHEILEDSDQDLGFDVDPFGWKVVLTPRVPSMASAAVSPAFQDLIKSLPELHQDGRLPTAADFDWALHPGGSTIITGVEQAMNLTQDHLRASYEIYVNYGNSSSATIMSVMDKLRDMSEGREYVVACAFGPGISLEMMILRRPRTIVDGLPTEDVD

SEQ ID NO: 257 - protein, 457 aa, Artificial Sequence
  PKS69
MASPNRFGQLGLSILGVGSQYPPHNLKPDAIDTLATRFYPDSPSMKKMRAINQFTGIDTRSSIGNPDHPVVNFPGPPSIAQLHEVFMSAGVPLAVSAARKAIAEAKIDLNEITHVVSTTCTDSANPGYDHFVCEKLGVSNQVERVLLHGVGCAGGLTALRTAANLALGHTFRGKPARILVLALEVSTTMVRSELESIDKLQETRIGVCLFSDGASAVVLSNGLGKASGPPVYDYLGWDNRIIPDTTSDLGFDVDPVGWKVILTPRVPKIAQGALQETFSDLMSSLSLPPPWDDAKPSDFDWAMHPGGATILSGAEKALGLVPEHMRASYDTYINHGNSSSATIFSVLDRLRSKDMDACTPDGRGPKDHIVGCAFGPGVAVEMCMLKRHFPPGAEGTGLQTPPETESEESSERSDDGEASVRSDDLDVEDEAAAVHTRRADAGVDSFIAQAISSVELD

SEQ ID NO: 258 - protein, 445 aa, Artificial Sequence; identical to SEQ ID NO: 141
  PKS70

SEQ ID NO: 259 - protein, 471 aa, Artificial Sequence
  PKS71
MASASKIHNGTNHQFSELNLAITGMGVEYPPYLLDPKCLDTICERHYPASPAIAKIRMINNYTGIDTRSAIGTVDHPMANMERAPTINQLCDIFLKDGVALSVTAARKALHEAQISALDITHVVSTTCTNSANPGFDHYVCKGLGITQPVEKVLLHGIGCSGGLASLRTAANLALGSSFRGRKARVLVIALEISSLLVRSELDSIHESQETRIGVTLFSDCASALILSNGLGEEHAEPVYELLGWDHRIIPDTEQDLGFDVDPLGWKVVLSPRVPKLAASVVEPAFNDLLATLPNLPPEYQTARDFDWALHPGGATILSGVERAMNISAEHMRASYDTYIKHGNSSSATVISVLDRLRQKDMDELAPGGTVKDYVVGCAFGPGIAIEMCMLKRNMHHVRKTLFPSGEATPPETESEGGRSKSESEGEELDAERKEATEQGEQSSEKVSGARPGGPRQGDSLSEALNGVDLD

SEQ ID NO: 260 - protein, 610 aa, Artificial Sequence
  PKS Consensus
  MISC_FEATURE (1)..(610): Xaa is any amino acid
XXXXXXXXXXXXXXXXXXXXXXXXXXXXXXXXQRAEXGXXXXATILAIGTAXPXNXIXQSDYXDYYFRITXXSEXXTELKEKFKRXICDKSXIKKRYXXXXXMXLXXEXXXXXXXXXXXXXXXXXXXXXXXXXXXXXEXLKENPNMXXYXXXXXXXXXXXXXXXXPSLDXRXDIXVXEVPKLXKEAAXKAIKEXXWGQXXXSXXKITHLVFXTXTGXVXMPGXDYQLXKXLGXLRPSVKRVMMYXMGCFAGGTXLRLAKDLAENNXXXXKGAXXRVLVVCSEIXTAXVXFRXPSDXXXXXLDSLXVGXALFGDGXAAAVIVGADPXXXXXXEXXXRPLFELVXXXQXILPDSEXAIXXXXXLREXGLXFXLXXKXVPXXXXXLISKNIEKXLXEXXXXLXXXXXGXXXXXXXISXXDWNXXXXXXLFWIVHPGGXAILDXVEXKLGLXXEKMRATRXVLSEYGNMSSAXVLFVLDEMRKKSXXXEGXXXXGEXXXXXGXEWGVLXXFGPGLTVEXVVLXSVXXXXXXXXXXXXXXXXXXXXXXXXXXXXXXXXXXXXXXXXXXXXXXXXXXXXXXXXXXXXXXXXXXXXXXXXXXXXXXXXXXXXXXXXX

SEQ ID NO: 261 - DNA, 240 bp, Artificial Sequence
  PKS72
atgtctttcgttttgggtatcggtatttctgttccaggtgaacctatttcccaacaatccttgaaagactccatctccaatgacttttctgataaggctgaaactaacgagaaggtcaagagaatctttgagcaatctcaaatcaagaccagacacttggttagagattacactaagccagagaactccatcaagttcagacatttggaaaccattaccgatgtgaacaaccagttcaag

SEQ ID NO: 262 - DNA, 240 bp, Artificial Sequence
  PKS73
atgtctaacaacaacccgtacattttgggcattggaacagccgttcctaatgagcccctaaagcagagtgagctttcagccgtgatgtccaaagatttctcatcagatccactagtcgttgataaggtcagtaagatattcgaacagagtcaaattaacactagatatctatatagaaaccctttgagggaggagacggccctgagacatagaaagaatgaaaatattaatgacgtgaat

SEQ ID NO: 263 - DNA, 240 bp, Artificial Sequence
  PKS74
atgggttatatcctaggcatggggacggcagtcccaaacggcccgctatatcaggatgatctgggcgccacgatgagcaaagacttctcagacgacccagagacagtagataaggtggtcaagatcttcgagcaatctcatataaagactcgtcacctttttcgtaaccccctattacccgaaacaagccttaagcagagaaaaaatgaaaatatcagcgacgtaaatgggcagttcata

SEQ ID NO: 264 - DNA, 240 bp, Artificial Sequence
  PKS75
atgggtttcaagaccaataacaatgcttttatacttggattaggtaatagcgtaccgggtgagccaatttctcaggaaaaattaaaagagtctattagtaatgatttttctaacgatcccaaaacaaatgaaaaggtaaaaagaatctttgagcagtcccatattaagacaaggtatttagttagggattacacaaaagaagagaacagtattaaatatagaagcaaagagagcattacg

SEQ ID NO: 265 - DNA, 240 bp, Artificial Sequence
  PKS76
atgtctaaccacttgagagctgaaggtccagcttccgttttggctatcggtacagctaaccctgaaaacatcttgttgcaagatgaattcccagactattacttcagagttaccaagtctgaacatatgactcaattgaaggaaaagtttagaaagatttgtgataagtctatgatcagaaagcgtaattgttttttgaacgaagaacatttaaaacaaaatccaagattggttgagcac

SEQ ID NO: 266 - protein, 362 aa, Artificial Sequence
  PKS72
MSFVLGIGISVPGEPISQQSLKDSISNDFSDKAETNEKVKRIFEQSQIKTRHLVRDYTKPENSIKFRHLETITDVNNQFKKVVPDLAQQACLRALKDWGGDKGDITHIVSVTSTGIIIPDVNFKLIDLLGLNKDVERVSLNLMGCLAGLSSLRTAASLAKASPRNRILVVCTEVCSLHFSNTDGGDQMVASSIFADGSAAYIIGCNPRIEETPLYEVMCSINRSFPNTENAMVWDLEKEGWNLGLDASIPIVIGSGIEAFVDTLLDKAKLQTSTAISAKDCEFLIHTGGKSILMNIENSLGIDPKQTKNTWDVYHAYGNMSSASVIFVMDHARKSKSLPTYSISLAFGPGLAFEGCFLKNVV

SEQ ID NO: 267 - protein, 365 aa, Artificial Sequence
  PKS73
MSNNNPYILGIGTAVPNEPLKQSELSAVMSKDFSSDPLVVDKVSKIFEQSQINTRYLYRNPLREETALRHRKNENINDVNRQFQKCAPDLSQRACEKAIKEWGGSIQDITHIVSVSSTGVVVPDINFVLIQRLGLNKDIERLSVNFMGCLAGLSSMRAAVPLASKHPKNRVLVVCTEICSTHFSTKEGVDQIVASTIFADGSAAYILGCNPTIYEHPLFEVIGSMTRSVPDTAHTMTWDISTDGWDLGLDQSIPHHIGGGIESFVNDLLAKNKSQTQDLTPKECEFLIHTGGKAILMSIEQSLGITSKQNQHSWDIYRNYGNMSSASVIFVLEHARHSKSLPQYSISLAFGPGLAFEGCVLKNMV

SEQ ID NO: 268 - protein, 361 aa, Artificial Sequence
  PKS74
MGYILGMGTAVPNGPLYQDDLGATMSKDFSDDPETVDKVVKIFEQSHIKTRHLFRNPLLPETSLKQRKNENISDVNGQFIKAAPSLSRESCEKAIKDWGGNVEDITHIVSVSSTGVVVPDINFLLIEKLGLNRDVERVSINFMGCLAGLSSLRAACSLACHNAKNRILVVCTEICSTHFTTNEGVDQIVASTIFADGSAAYILGCNPSIYERPLFEVLTSMNRSVPGTAHTMTWEISTNGWDLGLDQSIPHHIGGGIETFVRELLEKTKAQTHSTNFKDYEFLIHTGGKAILMSIENSLDIVSTQNSHSWSIYKAFGNMSSASVLFVMDHARKSKSLPQYSIGLAFGPGLAFEGCVLRNIC

SEQ ID NO: 269 - protein, 368 aa, Artificial Sequence
  PKS75
MGFKTNNNAFILGLGNSVPGEPISQEKLKESISNDFSNDPKTNEKVKRIFEQSHIKTRYLVRDYTKEENSIKYRSKESITDVNEAFKDCVPDLAEKACTKAIADWGGNKEDITHIMSVSSTGVIIPDVNFKLIDKLQLNQDIERVSLNMMGCLAGLSSLRTASSLAKASPRNRVLVVCTEICSLHFNNTGGGDQMVASSIFADGAAAYIVGCSPKINETPFFEVIQSINRATPNTENAMVWDLQKEGWNLGLASSIPHVIGEGIEKFVNDLLYKAKSQVSSLSPKECEFLIHTGGKSILMNIENALGIDPKMNKHTWDIYHAYGNMSSASVIFVLDHARKSKNLPTYSISLAFGPGLAFEGCLLRNLV

SEQ ID NO: 270 - protein, 387 aa, Artificial Sequence
  PKS76
MSNHLRAEGPASVLAIGTANPENILLQDEFPDYYFRVTKSEHMTQLKEKFRKICDKSMIRKRNCFLNEEHLKQNPRLVEHEMQTLDARQDMLVVEVPKLGKDACAKAIKEWGQPKSKITHLIFTSASTTDMPGADYHCAKLLGLSPSVKRVMMYQLGCYGGGTVLRIAKDIAENNKGARVLAVCCDIMACLFRGPSESDLELLVGQAIFGDGAAAVIVGAEPDESVGERPIFELVSTGQTILPNSEGTIGGHIREAGLIFDLHKDVPMLISNNIEKCLIEAFTPIGISDWNSIFWITHPGGKAILDKVEEKLHLKSDKFVDSRHVLSEHGNMSSSTVLFVMDELRKRSLEEGKSTTGDGFEWGVLFGFGPGLTVERVVVRSVPIKYG

SEQ ID NO: 271 - DNA, 3858 bp, Artificial Sequence
  CSAAE1 (XI-2up::pGAL-CSAAE1-cyc::XI-2up)
gaggattttcgatggagcaggatgaggagaaatagtaccacatgtatatatccattacaaaaaggtttatatacaattacaatagacccttgttggggtttctgaaaaaagaagtagtcgatgccatcggcaataatacggaattacgagaaacacaatcccgatccttttttgggtaattacttcaccgattctaccgatttatcatgccaaaaaaaattcaccgtgggttctagaagtgccctttgaggattgtagccactctaacccacacggcctccttactagctgactaaggtgacaaaaccgcaaggactggaaagtcgccactcatctgaaaattctcaagtttttcactactgagtttatgctttcgaatttttttgttcggtaatagcacggcggttcgattccggattagaagccgccgagcgggtgacagccctccgaaggaagactctcctccgtgcgtcctcgtcttcaccggtcgcgttcctgaaacgcagatgtgcctcgcgccgcactgctccgaacaataaagattctacaatactagcttttatggttatgaagaggaaaaattggcagtaacctggccccacaaaccttcaaatgaacgaatcaaattaacaaccataggatgataatgcgattagttttttagccttatttctggggtaattaatcagcgaagcgatgatttttgatctattaacagatatataaatgcaaaaactgcataaccactttaactaatactttcaacattttcggtttgtattacttcttattcaaatgtaataaaagtatcaacaaaaaattgttaatatacctctatactttaacgtcaaggagatgggtaaaaactataagtctttagactccgttgtcgcctccgactttattgctttgggtatcacctccgaagttgctgaaactttacacggtagattagctgagattgtttgtaactacggtgccgccactccacaaacttggattaatatcgctaaccatattttgtctccagacttaccattctccttgcatcaaatgttgttttacggttgttataaagattttggtccagctcctccagcttggatcccagatcctgaaaaagttaagtctactaacttaggtgctttgttagaaaaaagaggtaaagaattcttgggtgttaagtataaagatccaatctcttccttctctcattttcaagaattctccgttagaaacccagaagtttattggagaaccgttttgatggacgaaatgaagatctccttctctaaggatcctgaatgtattttgagacgtgacgatatcaacaatccaggtggttctgaatggttaccaggtggttatttgaactctgctaaaaattgtttgaacgtcaattccaacaaaaaattgaacgacaccatgattgtttggagagacgaaggtaacgatgacttaccattaaacaagttgaccttggaccaattgagaaagcgtgtctggttggtcggttacgccttggaggaaatgggtttggaaaaaggttgtgccatcgctatcgatatgccaatgcacgtcgacgccgtcgttatctatttggccatcgttttagctggttacgtcgtcgtctccatcgctgactctttctccgctccagaaatttccactagattgagattatccaaggccaaggctattttcactcaagatcacattattagaggtaagaagcgtattccattgtactccagagtcgtcgaagccaagtctcctatggccattgttatcccatgttctggttctaacattggtgctgaattgagagatggtgacatttcctgggactatttcttggaaagagctaaggaatttaagaactgcgaatttaccgccagagaacaacctgttgatgcctacactaacattttgttctcttctggtacaactggtgagccaaaggctatcccttggactcaagctaccccattaaaggccgccgctgatggttggtcccacttggacattcgtaagggtgacgtcatcgtctggccaactaacttgggttggatgatgggtccatggttagtttacgcctctttgttaaacggtgcttccattgccttgtacaacggttctccattggtttctggtttcgctaagtttgtccaagacgccaaggttaccatgttaggtgttgttccatctatcgtcagatcttggaagtctactaactgtgtctctggttacgattggtctactatcagatgcttctcttcctctggtgaagcctctaacgttgatgaatatttgtggttgatgggtcgtgccaactacaagccagttatcgaaatgtgtggtggtacagagatcggtggtgctttttccgctggttcctttttgcaagctcaatctttgtcttctttctcttctcaatgtatgggttgtactttgtatattttggataagaacggttacccaatgcctaagaacaaaccaggtatcggtgaattagctttgggtccagttatgttcggtgcttccaagaccttgttgaacggtaatcaccatgatgtctatttcaaaggtatgccaactttaaacggtgaagtcttgagacgtcacggtgacatctttgaattgacttctaacggttactaccatgctcacggtagagctgatgatactatgaacattggtggtattaagatttcttctatcgaaatcgaaagagtttgtaatgaagttgacgacagagtctttgaaaccactgctattggtgtcccaccattgggtggtggtccagaacaattagtcattttcttcgttttgaaggattctaacgacactaccatcgacttaaaccaattgagattgtctttcaacttgggtttgcaaaagaagttgaacccattatttaaagtcactagagttgttccattgtcttctttgccaagaaccgccaccaacaagattatgagaagagttttgagacaacaattttctcatttcgaaggctgactcgagcatgcatctagagggccgcatcatgtaattagttatgtcacgcttacattcacgccctccccccacatccgctctaaccgaaaaggaaggagttagacaacctgaagtctaggtccctatttatttttttatagttatgttagtattaagaacgttatttatatttcaaatttttcttttttttctgtacagacgcgtgtacgcatgtaacattatactgaaaaccttgcttgagaaggttttgggacgctcgaaggctttaatttgccacacgactagcgctttcagatattaaaaagtttagatgtaggttttagcggtaacagttatataaatcgtgtttcttctcttgatgaaacaaaaaaatgctagaaaaactttgtcgtttcttacttttggtgcgctttgcagttttcgtggctagacttagaatcatttctcctcagatttcttgattaaagtttggtgcgaagccctactctaacattggtgttcttcttttcattcacgcaagttaagtccaggaaggtgagcaaatgctcatccttctgttcatgcgtgacggctgaattatccttatctggcgtacccgtgcagccgtttccgtgcctcggttcctccgagatatccttagggaccgccagggaccatgattgcgtcaactgttgtcaccgctccagaggatcctctgtaaccttttcaaccataaaaatagaaagggcacagggttggggtatttgaattttttttttgggttttttcgtattacttattacttaccttcttttctatataattttgtttttccctggtagagcggaatcttcccac

SEQ ID NO: 272 - DNA, 2051 bp, Artificial Sequence
  PC20 (Fgf16::pGAL-PC20-cyc::FgF16)
ttagtagatgatagttgatttttattccaacattattgtactcagcaattgttgcgaaacagacaagattaagtatattattcaaggccttgcttacctagatgaaccattgagaaatatacatattgagcaatacctctaggtccgaagttccgtgcctacaccctttagtcagatttagattatatgagataagtggtattttgtggaccaagtttgtgattaatctgatatcaagttactttcttaacgacattaggacgccagggtagccagtattattcaagtccatagaacagcctgtataccttcacttcattaggtatattcttggttatgcgttatttaaatcctcatctgccgctgcttaaaaaaagcagctaaagtgttgcgtaggcacggattagaagccgccgagcgggtgacagccctccgaaggaagactctcctccgtgcgtcctcgtcttcaccggtcgcgttcctgaaacgcagatgtgcctcgcgccgcactgctccgaacaataaagattctacaatactagcttttatggttatgaagaggaaaaattggcagtaacctggccccacaaaccttcaaatgaacgaatcaaattaacaaccataggatgataatgcgattagttttttagccttatttctggggtaattaatcagcgaagcgatgatttttgatctattaacagatatataaatgcaaaaactgcataaccactttaactaatactttcaacattttcggtttgtattacttcttattcaaatgtaataaaagtatcaacaaaaaattgttaatatacctctatactttaacgtcaaggagatggccgtcaagcacttgatcgtcttaaagtttaaggacgagatcactgaagcccaaaaggaagaattcttcaaaacttacgttaacttggttaacatcattcctgctatgaaggacgtctactggggtaaggatgtcactcaaaaaaacaaggaagaaggttatacccacatcgttgaagtcaccttcgaatctgttgaaactattcaagactacatcattcacccagctcacgtcggtttcggtgatgtttacagatctttctgggaaaaattgttgatcttcgactacaccccaagaaagggctaactcgagcatgcatctagagggccgcatcatgtaattagttatgtcacgcttacattcacgccctccccccacatccgctctaaccgaaaaggaaggagttagacaacctgaagtctaggtccctatttatttttttatagttatgttagtattaagaacgttatttatatttcaaatttttcttttttttctgtacagacgcgtgtacgcatgtaacattatactgaaaaccttgcttgagaaggttttgggacgctcgaaggctttaatttgctccgttaattcgggtttcaatcacttcgtttgtctatcgtatcgcagcctagtgaatatttaattctttcaataaaaaaggcttaaaatcaccatgaaaatcacaagaggaatctttcaacaagaacaatagtatacaatccatgaatgaaggagttcatatttgactagaactatacaaaggttttgtactgtttttactgtgagggtagcatctcatttatccagaatctcagaagggagaaacccaatcgctaaatcgatattatcacccagaagtttcaaataggcgattgtagaatatacacagggacaaccactcagtttatggcttcagtgcgcgcccagttctggaggaaagcattatcgaagtaataaaactttaaaaaagctctccgcaactaatgaggattgcagtatccagatacccttgttttctgccaaatgaacacttttactatgtcatataaacaaaaagtgccatttcttggtactgcttcagtcttaggaatggtcaatacgttattattacttaaatatacgattaataacatgctctgttgcgtatttagtaagtgtgtaaggaaactgtaatattacctaaccggtatcccacgtgtttcacgaa

SEQ ID NO: 273 - DNA, 4684 bp, Artificial Sequence
  OXC155 (Apel-3::OXC155-cyc::Apel-3)
gcagagaaggagcaaataagccagttttaaggaaccgagataagctgttttcgcccattgttctagttctacaaaatatctacagggaatcgatgaggttgtaagaaatcctgaatactctatgatagtgcataacactaaaaagttgaaagaatcccgtatcatggacgatttccttgaacatttgagcaaagacgataacaaagcatggtatggcgcggaagaaaccgagagagctgcaaaattagatgcaatagaaacactacttattacagatagtgtactaaaaaggaacgacgtgaaaaaacgtgaaaaatacctagacctaatagagaatagtggaaacaacaatggcaaaatattcgtactcagtacttcaaaaatcacagtgagcaacttgacaaaccaacaataaagcagccgctaccaaacagacaagattcagtatgtaaggtaaatacctttttgcacagttaaactacccaaacttattaaagcttgataaattactgaaattccacctttcagttagattcaggcctcatatagattagatatagggtacgtaacattctgtcaaccaagttgttggaatgaaagtctaaaatgtcatctattcggtagcactcatgttactagtatactgtcacatgcggtgtaacgtggggacataaaacagacatcaaatataatggaagctgaaatgcaaagatcgataatgtaataggaatgaaacatataaaacgaaaggagaagtaatggtaatattagtatgtagaaataccgattcaattttggggattcttatattctcgagagaatttctagtataatctgtatacataatattataggctttaccaacaatggaatttcgacaattatcatattattcaccaattaatcacaagttggtaatgagtttgataacaagttactttcttaacaacgttagtatcgtcaaaacactcggttttactcgagcttgtagcacaataataccgtgtagagttctgtattgttcttcttagtgcttgtatatgctcatcccgaccttccattcggattagaagccgccgagcgggtgacagccctccgaaggaagactctcctccgtgcgtcctcgtcttcaccggtcgcgttcctgaaacgcagatgtgcctcgcgccgcactgctccgaacaataaagattctacaatactagcttttatggttatgaagaggaaaaattggcagtaacctggccccacaaaccttcaaatgaacgaatcaaattaacaaccataggatgataatgcgattagttttttagccttatttctggggtaattaatcagcgaagcgatgatttttgatctattaacagatatataaatgcaaaaactgcataaccactttaactaatactttcaacattttcggtttgtattacttcttattcaaatgtaataaaagtatcaacaaaaaattgttaatatacctctatactttaacgtcaaggagatgaggcaggtttggttctcttggattgtgggattgttcctatgttttttcaacgtgtcttctgctgctccagtcaacactacaacagaagatgaaacggcacaaattccggctgaagctgtcatcggttactcagatttagaaggggatttcgatgttgctgttttgccattttccaacagcacaaataacgggttattgtttataaatactactattgccagcattgctgctaaagaagaaggggtatctctcgagaaaagagaggctgaagctatgccaagagaaaacttcttgaagtgtttctctaagcatatcccaaacaacgttgctaacccaaagttggtctatactcaacacgatcaattgtatatgtctattttgaactctactattcaaaatttgagattcatttctgataccaccccaaaaccattggtcattgtcactccttccaacaactcccatatccaagctactattttgtgttctaagaaggtcggtttgcaaatcagaaccagatctggtggtcacgatgccgagggtatgtcctacatttctcaagttccttttgtcgttgttgatttgagaaacatgcactccatcaaaattgatgttcactcccaaaccgcctgggtcgaagctggtgccactttgggtgaagtctactactggattaatgaaaagaatgaaaatttgtccttcccaggtggttactgtccaaccgttggtgttggtggtcacttctccggtggtggttacggtgctttgatgagaaactacggtttagctgctgataacattatcgacgcccacttggttaatgttgatggtaaagtcttggacagaaaatctatgggtgaagatttgttttgggccattagaggtggtggtggtgagaacttcggtatcattgctgcctggaagatcaaattggttgctgttccatctaagtccactattttttccgttaagaagaacatggaaatccatggtttagttaaattatttaacaagtggcaaaacattgcctacaagtacgataaagatttggttttgatgacccatttcattactaagaatattactgacaatcacggtaagaacaagactaccgttcacggttacttctcttctattttccacggtggtgtcgactccttagttgatttgatgaacaaatcctttccagagttgggtattaagaagactgattgtaaggaattctcttggattgacaccaccatcttctactctggtgtcgtcaactttaacactgccaactttaagaaggaaattttattggatagatccgctggtaagaagaccgctttttccatcaaattggattacgtcaagaagccaatccctgagactgccatggtcaagatcttggaaaagttgtatgaagaagacgttggtgctggtatgtacgttttatatccatacggtggtattatggaagagatttccgaatccgctattccattcccacatagagctggtatcatgtacgaattgtggtacactgcttcttgggaaaaacaagaagataatgaaaagcatattaactgggttagatccgtttacaacttcaccactccatatgtttctcaaaacccaagattggcttacttgaactatagagatttggatttgggtaagactaaccacgcctctccaaacaattacactcaagctagaatctggggtgaaaaatacttcggtaagaacttcaacagattagtcaaagtcaagaccaaagttgacccaaacaacttcttcagaaacgagcaatccattcctccattgcctccacaccatcacggccatcatcaccatcaccattagctcgagcatgcatctagagggccgcatcatgtaattagttatgtcacgcttacattcacgccctccccccacatccgctctaaccgaaaaggaaggagttagacaacctgaagtctaggtccctatttatttttttatagttatgttagtattaagaacgttatttatatttcaaatttttcttttttttctgtacagacgcgtgtacgcatgtaacattatactgaaaaccttgcttgagaaggttttgggacgctcgaaggctttaatttgctttgcgaaaccctatgctctgttgttcggatttgaaattttaaaactacattaatgtgttagtttttctttctttctttctttgtcttgacgtgatttggacttctgtcttgcattcgcgtccattcatctgacccaatattccttttggttttgttatccttataaaaagaaaggaagcttcttagagggaaaaaaatgatgaagagtaatgccaaaatataaataaataaataaatatgaaaatcattttctatttttaatagaataagaagagcatcttaagattacaatttcaagaaatagtttacacagtatatccaataactccaataaactactttcctatacaaatttctatggtgggattaatagtaaaacttctgtacttctctaattcaccaagaaattaaggtaaacatctggtaagcactatccagctttttgctattacacatatggcttttctgcaatcatttcttcccattttgtctcaagccgttagtcttgaaaccacaggcggagtagagttacttgatgcggtattttacatgccttttttcactgcaaaaaaaatgaaatacatatttacacgatttgcaggacagtttacgatagtgagtatgcagaatagttaacacctttgttttatccttttgtgtcttaattatatgatataaaggcgcctggccaatagcttgcagcgtagctaaactctaaaatttatctaaatcactcatataaaccgaacccttccccttccgcttatagtacagtacctatacatttcataaacatggcatggcgatcagcgccaaacaatatggaaaatccacagaaagctattcattgaaaaaatagtacaaataagtcacatgatgatatttgattttattatatttttaaaaaaagtaaaaaataaaaagtagtttatttttaaaaaataaaatttaaaatattagtgtatttgatttccgaaagttaaaaaagaaatagtaagaaatatatatttcattgaatggatatatgaaacgtttactggtggaagttttgctc

SEQ ID NO: 274 - DNA, 7114 bp, Artificial Sequence; identical to SEQ ID NO: 8
  PDH

SEQ ID NO: 275 - DNA, 3256 bp, Artificial Sequence; identical to SEQ ID NO: 9
  MAF1

SEQ ID NO: 276 - DNA, 4538 bp, Artificial Sequence
  ERG20K197E
ggccgcgttgctggcgtttttccataggctccgcccccctgacgagcatcacaaaaatcgacgctcaagtcagaggtggcgaaacccgacaggactataaagataccaggcgtttccccctggaagctccctcgtgcgctctcctgttccgaccctgccgcttaccggatacctgtccgcctttctcccttcgggaagcgtggcgctttctcaatgctcacgctgtaggtatctcagttcggtgtaggtcgttcgctccaagctgggctgtgtgcacgaaccccccgttcagcccgaccgctgcgccttatccggtaactatcgtcttgagtccaacccggtaagacacgacttatcgccactggcagcagccactggtaacaggattagcagagcgaggtatgtaggcggtgctacagagttcttgaagtggtggcctaactacggctacactagaaggacagtatttggtatctgcgctctgctgaagccagttaccttcggaaaaagagttggtagctcttgatccggcaaacaaaccaccgctggtagcggtggtttttttgtttgcaagcagcagattacgcgcagaaaaaaaggatctcaagaagatcctttgatcttttctacggggtctgacgctcagtggaacgaaaactcacgttaagggattttggtcatgaacgcatctacgactgtgggtcccgtggagaaatgtatgaaaccctgtatggagagtgattagcttgcctcgtccccgccgggtcacccggccagcgacatggaggcccagaataccctccttgacagtcttgacgtgcgcagctcaggggcatgatgtgactgtcgcccgtacatttagcccatacatccccatgtataatcatttgcatccatacattttgatggccgcacggcgcgaagcaaaaattacggctcctcgctgcagacctgcgagcagggaaacgctcccctcacagacgcgttgaattgtccccacgccgcgcccctgtagagaaatataaaaggttaggatttgccactgaggttcttctttcatatacttccttttaaaatcttgctaggatacagttctcacatcacatccgaacataaacaaccatgggtaaggaaaagactcacgtttcgaggccgcgattaaattccaacatggatgctgatttatatgggtataaatgggctcgcgataatgtcgggcaatcaggtgcgacaatctatcgattgtatgggaagcccgatgcgccagagttgtttctgaaacatggcaaaggtagcgttgccaatgatgttacagatgagatggtcagactaaactggctgacggaatttatgcctcttccgaccatcaagcattttatccgtactcctgatgatgcatggttactcaccactgcgatccccggcaaaacagcattccaggtattagaagaatatcctgattcaggtgaaaatattgttgatgcgctggcagtgttcctgcgccggttgcattcgattcctgtttgtaattgtccttttaacagcgatcgcgtatttcgtctcgctcaggcgcaatcacgaatgaataacggtttggttgatgcgagtgattttgatgacgagcgtaatggctggcctgttgaacaagtctggaaagaaatgcataagcttttgccattctcaccggattcagtcgtcactcatggtgatttctcacttgataaccttatttttgacgaggggaaattaataggttgtattgatgttggacgagtcggaatcgcagaccgataccaggatcttgccatcctatggaactgcctcggtgagttttctccttcattacagaaacggctttttcaaaaatatggtattgataatcctgatatgaataaattgcagtttcatttgatgctcgatgagtttttctaatcagtactgacaataaaaagattcttgttttcaagaacttgtcatttgtatagtttttttatattgtagttgttctattttaatcaaatgttagcgtgatttatattttttttcgcctcgacatcatctgcccagatgcgaagttaagtgcgcagaaagtaatatcatgcgtcaatcgtatgtgaatgctggtcgctatactgctgtcgattcgatactaacgccgccatccagtgtcgaaaacgagctctcgagaacccttaatcatacgttgaaactacggcaaaggattggtcagatcgcttcatacaggggtatcccggcataaccctcactaaagggaacaaaagctggagctcgtttaaaagcaacaggcgcgttggacttttaattttcgaggaccgcgaatccttacatcacacccaatcccccacaagtgatcccccacacaccatagcttcaaaatgtttctactccttttttactcttccagattttctcggactccgcgcatcgccgtaccacttcaaaacacccaagcacagcatactaaatttcccctctttcttcctctagggtgtcgttaattacccgtactaaaggtttggaaaagaaaaaagagaccgcctcgtttctttttcttcgtcgaaaaaggcaataaaaatttttatcacgtttctttttcttgaaaatttttttttttgatttttttctctttcgatgacctcccattgatatttaagttaataaacggtcttcaatttctcaagtttcagtttcatttttcttgttctattacaactttttttacttcttgctcattagaaagaaagcatagcaatctaatctaagttttaatggcgggggtcggaatgattaaagaaaggggctgtgggcgagattgaaacaatggcttcagaaaaagaaattaggagagagagattcttgaacgttttccctaaattagtagaggaattgaacgcatcgcttttggcttacggtatgcctaaggaagcatgtgactggtatgcccactcattgaactacaacactccaggcggtaagctaaatagaggtttgtccgttgtggacacgtatgctattctctccaacaagaccgttgaacaattggggcaagaagaatacgaaaaggttgccattctaggttggtgcattgagttgttgcaggcttacttcttggtcgccgatgatatgatggacaagtccattaccagaagaggccaaccatgttggtacaaggttcctgaagttggggaaattgccatcaatgacgcattcatgttagaggctgctatctacaagcttttgaaatctcacttcagaaacgaaaaatactacatagatatcaccgaattgttccatgaggtcaccttccaaaccgaattgggccaattgatggacttaatcactgcacctgaagacaaagtcgacttgagtaagttctccctaaagaagcactccttcatagttactttcgagactgcttactattctttctacttgcctgtcgcattggccatgtacgttgccggtatcacggatgaaaaggatttgaaacaagccagagatgtcttgattccattgggtgaatacttccaaattcaagatgactacttagactgcttcggtaccccagaacagatcggtaagatcggtacagatatccaagataacaaatgttcttgggtaatcaacaaggcattggaacttgcttccgcagaacaaagaaagactttagacgaaaattacggtaagaaggactcagtcgcagaagccaaatgcaaaaagattttcaatgacttgaaaattgaacagctataccacgaatatgaagagtctattgccaaggatttgaaggccaaaatttctcaggtcgatgagtctcgtggcttcaaagctgatgtcttaactgcgttcttgaacaaagtttacaagagaagcaaataaccagttaataaaccgtggcaaacatgatggtggcctaatggaggtcaccaacagaagacgggagacactagcacacaactttaccaggcaaggtatttgacgctagcatgtgtccaattcagtgtcatttatgattttttgtagtaggatataaatatatacagcgctccaaatagtgcggttgccccaaaaacaccacggaacctcatctgttctcgtactttgttgtgacaaagtagctcactgccttattatcacattttcattatgcaacgcttcggaaaatacgatgttgaaaatgcctctagagatgaaaaacaatcgtaaaagggtcctgcgtaattgaaacatttgatcagtatgcagtggcacagaaacaaccaggaatactatagtcataggcaatacaaggtatatattggctatgcagacccctccagaaagtaccgacgtcaagttagatacacttaacgaacctagtgcacatttaattgagaaaaatgtggctcttcctaaggacatattccgttcgtacttgagttattggatctatgaaatcgctcgctatacaccagtcatgattttgtcgcggccgcggtacctaataacttcgtatagcatacattatacgaagttat

SEQ ID NO: 277 - DNA, 4859 bp, Artificial Sequence
  tHMGR1-IDI
ggcgcgcccgagatctttgtgttcggttacccggctcagatcctaacttcgtatgtttattcgtataagttactgttgtccacaggcaatactctgcagaaaattaaaacggcattaatgctaggacaaccagaattgttactactgtatgtgcgatagttgataactgcaacattatgcccggtatattctcaaaaaaccctattactgcatacgaagaaatcgctcgagtttatcattatcaatactgccatttcaaagaatacgtaaataattaatagtagtgattttcctaactttatttagtcaaaaaattagccttttaattctgctgtaacccgtacatgcccaaaatagggggcgggttacacagaatatataacatcgtaggtgtctgggtgaacagtttattcctggcatccactaaatataatggagcccgctttttaagctggcatccagaaaaaaaaagaatcccagcaccaaaatattgttttcttcaccaaccatcagttcataggtccattctcttagcgcaactacagagaacaggggcacaaacaggcaaaaaacgggcacaacctcaatggagtgatgcaacctgcctggagtaaatgatgacacaaggcaattgacccacgcatgtatctatctcattttcttacaccttctattaccttctgctctctctgatttggaaaaagctgaaaaaaaaggttgaaaccagttccctgaaattattcccctacttgactaataagtatataaagacggtaggtattgattgtaattctgtaaatctatttcttaaacttcttaaattctacttttatagttagtcttttttttagttttaaaacaccaagaacttagtttcgaaaacaatggttttaaccaataaaacagtcatttctggatcgaaagtcaaaagtttatcatctgcgcaatcgagctcatcaggaccttcatcatctagtgaggaagatgattcccgcgatattgaaagcttggataagaaaatacgtcctttagaagaattagaagcattattaagtagtggaaatacaaaacaattgaagaacaaagaggtcgctgccttggttattcacggtaagttacctttgtacgctttggagaaaaaattaggtgatactacgagagcggttgcggtacgtaggaaggctctttcaattttggcagaagctcctgtattagcatctgatcgtttaccatataaaaattatgactacgaccgcgtatttggcgcttgttgtgaaaatgttataggttacatgcctttgcccgttggtgttataggccccttggttatcgatggtacatcttatcatataccaatggcaactacagagggttgtttggtagcttctgccatgcgtggctgtaaggcaatcaatgctggcggtggtgcaacaactgttttaactaaggatggtatgacaagaggcccagtagtccgtttcccaactttgaaaagatctggtgcctgtaagatatggttagactcagaagagggacaaaacgcaattaaaaaagcttttaactctacatcaagatttgcacgtctgcaacatattcaaacttgtctagcaggagatttactcttcatgagatttagaacaactactggtgacgcaatgggtatgaatatgatttctaaaggtgtcgaatactcattaaagcaaatggtagaagagtatggctgggaagatatggaggttgtctccgtttctggtaactactgtaccgacaaaaaaccagctgccatcaactggatcgaaggtcgtggtaagagtgtcgtcgcagaagctactattcctggtgatgttgtcagaaaagtgttaaaaagtgatgtttccgcattggttgagttgaacattgctaagaatttggttggatctgcaatggctgggtctgttggtggatttaacgcacatgcagctaatttagtgacagctgttttcttggcattaggacaagatcctgcacaaaatgttgaaagttccaactgtataacattgatgaaagaagtggacggtgatttgagaatttccgtatccatgccatccatcgaagtaggtaccatcggtggtggtactgttctagaaccacaaggtgccatgttggacttattaggtgtaagaggcccgcatgctaccgctcctggtaccaacgcacgtcaattagcaagaatagttgcctgtgccgtcttggcaggtgaattatccttatgtgctgccctagcagccggccatttggttcaaagtcatatgacccacaacaggaaacctgctgaaccaacaaaacctaacaatttggacgccactgatataaatcgtttgaaagatgggtccgtcacctgcattaaatcctaatggacttcttcgccagaggtttggtcaagtctccaatcaaggttgtcggcttgtctaccttgccagaaatttacgaaaagatggaaaagggtcaaatcgttggtagatacgttgttgacacttctaaataagcgaatttcttatgatttatgatttttattattaaataagttataaaaaaaataagtgtatacaaattttaaagtgactcttaggttttaaaacgaaaattcttattcttgagtaactctttcctgtaggtcaggttgctttctcaggtatagcatgaggtcgctcttattgaccacacctctaccggcatgcaagcaacaggcgcgttggacttttaattttcgaggaccgcgaatccttacatcacacccaatcccccacaagtgatcccccacacaccatagcttcaaaatgtttctactccttttttactcttccagattttctcggactccgcgcatcgccgtaccacttcaaaacacccaagcacagcatactaaatttcccctctttcttcctctagggtgtcgttaattacccgtactaaaggtttggaaaagaaaaaagagaccgcctcgtttctttttcttcgtcgaaaaaggcaataaaaatttttatcacgtttctttttcttgaaaatttttttttttgatttttttctctttcgatgacctcccattgatatttaagttaataaacggtcttcaatttctcaagtttcagtttcatttttcttgttctattacaactttttttacttcttgctcattagaaagaaagcatagcaatctaatctaagttttaataaacaatgactgccgacaacaatagtatgccccatggtgcagtatctagttacgccaaattagtgcaaaaccaaacacctgaagacattttggaagagtttcctgaaattattccattacaacaaagacctaatacccgatctagtgagacgtcaaatgacgaaagcggagaaacatgtttttctggtcatgatgaggagcaaattaagttaatgaatgaaaattgtattgttttggattgggacgataatgctattggtgccggtaccaagaaagtttgtcatttaatggaaaatattgaaaagggtttactacatcgtgcattctccgtctttattttcaatgaacaaggtgaattacttttacaacaaagagccactgaaaaaataactttccctgatctttggactaacacatgctgctctcatccactatgtattgatgacgaattaggtttgaagggtaagctagacgataagattaagggcgctattactgcggcggtgagaaaactagatcatgaattaggtattccagaagatgaaactaagacaaggggtaagtttcactttttaaacagaatccattacatggcaccaagcaatgaaccatggggtgaacatgaaattgattacatcctattttataagatcaacgctaaagaaaacttgactgtcaacccaaacgtcaatgaagttagagacttcaaatgggtttcaccaaatgatttgaaaactatgtttgctgacccaagttacaagtttacgccttggtttaagattatttgcgagaattacttattcaactggtgggagcaattagatgacctttctgaagtggaaaatgacaggcaaattcatagaatgctataaacagaagacgggagacactagcacacaactttaccaggcaaggtatttgacgctagcatgtgtccaattcagtgtcatttatgattttttgtagtaggatataaatatatacagcgctccaaatagtgcggttgccccaaaaacaccacggaacctcatctgttctcgtactttgttgtgacaaagtagctcactgccttattatcacattttcattatgcaacgcttcggaaaatacgatgttgaaaatgcctctagagatgaaaaacaatcgtaaaagggtcctgcgtaattgaaacatttgatcagtatgcagtggcacagaaacaaccaggaatactatagtcataggcaatacaaggtatatattggctatgcagacccctccagaaagtaccgacgtcaagttagatacacttaacgaacctagtgcacatttaattgagaaaaatgtggctcttcctaaggacatattccgttcgtacttgagttattggatctatgaaatcgctcgctatacaccagtcatgattttgtcacactcgtatatgcatgttgttgaaactctgttacgctgaactaacaatcacacatgtagaggtcaccgggaaaagttgcgaccccatggaaggtcgatctcttcgtttggctttgcttggctggcggcattgcgcttcttcgcttatacccgtctcttgacgctcgagctcgttcattgagatacctttattcttgcacattttctggcttttttcgctactcgggtacggcgcgcc

SEQ ID NO: 278 - DNA, 3564 bp, Artificial Sequence; identical to SEQ ID NO: 2
  NPGA

SEQ ID NO: 279 - DNA, 3600 bp, Artificial Sequence
  PT254 (Fgf20::pGAL-PT254-cyc::Fgf20)
agtatgacaagttttaatcgagatagtttgacgttcgttttttactttgaatatactcgtagtctttttactttttgagtataaaaaaaaaatgactagcaaaataaaattagtagtctaaaaaagaaagctcgcactcaggatcgaactaaggaccaacagatttgcaatctgctgcgctaccactgcgccatacgagcttttgaattatggtaattttgattatcctagaatgttatatctcaatatctcaatatattttggacatctatgaaacacccataaagcagccgctaccaaacagacaagattcagtatgtaaggtaaatacctttttgcacagttaaactacccaaacttattaaagcttgataaattactgaaattccacctttcagttagattcaggcctcatatagattagatatagggtacgtaacattctgtcaaccaagttgttggaatgaaagtctaaaatgtcatctattcggtagcactcatgttactagtatactgtcacatgcggtgtaacgtggggacataaaacagacatcaaatataatggaagctgaaatgcaaagatcgataatgtaataggaatgaaacatataaaacgaaaggagaagtaatggtaatattagtatgtagaaataccgattcaattttggggattcttatattctcgagagaatttctagtataatctgtatacataatattataggctttaccaacaatggaatttcgacaattatcatattattcaccaattaatcacaagttggtaatgagtttgataacaagttactttcttaacaacgttagtatcgtcaaaacactcggttttactcgagcttgtagcacaataataccgtgtagagttctgtattgttcttcttagtgcttgtatatgctcatcccgaccttccattcggattagaagccgccgagcgggtgacagccctccgaaggaagactctcctccgtgcgtcctcgtcttcaccggtcgcgttcctgaaacgcagatgtgcctcgcgccgcactgctccgaacaataaagattctacaatactagcttttatggttatgaagaggaaaaattggcagtaacctggccccacaaaccttcaaatgaacgaatcaaattaacaaccataggatgataatgcgattagttttttagccttatttctggggtaattaatcagcgaagcgatgatttttgatctattaacagatatataaatgcaaaaactgcataaccactttaactaatactttcaacattttcggtttgtattacttcttattcaaatgtaataaaagtatcaacaaaaaattgttaatatacctctatactttaacgtcaaggagaaaaaaccccggatcggactactagcagctgtaatacgactcactatagggaatattaagcttaaacaatgagagccggttccgatcaaattgaaggttctccacatcatgaatccgataactctattgccaccaagattttgaacttcggtcatacttgttggaagttgcaaagaccatatgttgtcaagggtatgatttctattgcttgcggtttgtttggtcgtgagttgtttaacaacagacacttgttttcttggggcttgatgtggaaagctttttttgctttggttcccatcctgtcctttaatttctttgccgccattatgaaccagatctacgatgttgatatcgacagaatcaacaagccagatttgccattggtttctggtgaaatgtctattgaaaccgcctggattttgtccattatcgttgctttgactggtttgatcgttaccatcaagttgaaatctgctcccttgttcgttttcatctacatctttggtattttcgctggtttcgcttattccgttccaccaattagatggaaacaatacccattcaccaatttcttgatcaccatctcttctcatgttggtttggctttcacttcttactctgctactacttctgctttgggtttaccatttgtttggaggccagctttctctttcattattgctttcatgaccgttatgggtatgaccattgctttcgctaaggatatctctgatattgaaggtgatgctaagtacggtgtttctactgttgctacaaaattgggtgctagaaacatgacctttgttgtctctggtgttctgttgttgaactacttggtttccatttccattggtatcatttggccacaggttttcaagtccaacatcatgattttgtctcatgccatcttggctttctgcttgatttttcaaactagagaattggccttggctaactatgcttctgctccatctagacaattcttcgaattcatctggttgttgtactacgccgaatacttcgtctacgtgttcatttgactcgagcatgcatctagagggccgcatcatgtaattagttatgtcacgcttacattcacgccctccccccacatccgctctaaccgaaaaggaaggagttagacaacctgaagtctaggtccctatttatttttttatagttatgttagtattaagaacgttatttatatttcaaatttttcttttttttctgtacagacgcgtgtacgcatgtaacattatactgaaaaccttgcttgagaaggttttgggacgctcgaaggctttaatttgctttgcgaaaccctatgctctgttgttcggatttgaaattttaaaactacattaatgtgttagtttttctttctttctttctttgtcttgacgtgatttggacttctgtcttgcattcgcgtccattcatctgacccaatattccttttggttttgttatccttataaaaagaaaggaagcttcttagagggaaaaaaatgatgaagagtaatgccaaaatataaataaataaataaatatgaaaatcattttctatttttaatagaataagaagagcatcttaagattacaatttcaagaaatagtttacacagtatatccaataactccaataaactactttcctatacaaatttctatggtgggattaatagtaaaacttctgtacttctctaattcaccaagaaattaaggtaaacatctggtaagcactatccagctttttgctattacacatatggcttttctgcaatcatttcttcccattttgtctcaagccgttagtcttgaaaccacaggcggagtagagttacttgatgcggtattttacatgccttttttcactgcaaaaaaaatgaaatacatatttacacgatttgcaggacagtttacgatagtgagtatgcagaatagttaacacctttgttttatccttttgtgtcttaattatatgatataaaggcgcctggcgttatcggatagtaatagatgctagttatcaacatttcacaattgaaggaaataaagttgaagtactcaacaaaaacttacttcagaattaaatttttggggggaacataggcatcctatgacaggtgaccacaagcccctcaacgcaatctaatattttacaaagtggtaaaattctttcgttcttcgttttaatatacagtcatttattgattctattac

SEQ ID NO: 280 - DNA, 2425 bp, Artificial Sequence
  PT72 (Fgf20::pGAL-PT72-cyc::Fgf20)
cccaaagctaagagtcccattttattcttctatatgtatattttcgatactctaaaccaccctacaatgtagccctatactaaatctgctcaattttcagcttctacaagtgactcgagaccacgtggaaagatccaactactccagcacaacgattcaatataatcgattgctccactcataagaggcaagaacaagcttcaacttttggtaagccgccgtttataaacagggaagatgtcctttgtcaagggaggcacagagcatggccaatttggcaaattgcggattagaagccgccgagcgggtgacagccctccgaaggaagactctcctccgtgcgtcctcgtcttcaccggtcgcgttcctgaaacgcagatgtgcctcgcgccgcactgctccgaacaataaagattctacaatactagcttttatggttatgaagaggaaaaattggcagtaacctggccccacaaaccttcaaatgaacgaatcaaattaacaaccataggatgataatgcgattagttttttagccttatttctggggtaattaatcagcgaagcgatgatttttgatctattaacagatatataaatgcaaaaactgcataaccactttaactaatactttcaacattttcggtttgtattacttcttattcaaatgtaataaaagtatcaacaaaaaattgttaatatacctctatactttaacgtcaaggagatgccagctacgaggactcccatccaccccgaagcggcggcttacaagaacccccgttaccagtcaggtcccttaagtgtaataccaaagtcatttgttccctactgcgagttgatgaggttggaattgcctcatggtaattttcttggttacttcccgcacctagttgggctactatacggctctagcgcgtcaccagccaggttaccagctaacgaggttgcgttccaagcggttttatacattggttggacgttctttatgagaggcgcgggttgcgcgtggaacgatgtcgttgatcaagactttgatcgtaaaaccacccgttgcagagtgaggccagtcgcaagaggggcggtcagcactacaagtgcaaacatttttggtttcgcaatggtggctttggcttttgcctgtatctcaccccttccagccgagtgccaaaggcttgggttaatgaccacagttttatccattatctatcctttctgcaagagggttacaaattttgctcaggtgattttaggtatgacactggcaattaacttcatattggctgcttatggcgcgggccttcctgctatagaggctccgtacactgtgcccacaatttgcgtcacaacagcaattaccctgctagtggtattttacgatgtggtctatgcgaggcaagacaccgctgacgacttaaaaagtggggtgaaaggcatggcagtgcttttccgtaactatgtcgagattctactaacatctatcacgttagttattgctggtcttattgctacgacgggggttctggttgacaacggtccgtatttttttgtctttagcgttgcggggttacttgctgctttattggcgatgatcggaggcataaggtacaggatttttcacacatggaactcctactcaggctggttttacgcgcttgctatctttaaccttctagggggctacttgattgagtacttggaccaagtgccgatgctaaataaagcgtgataactcgagcatgcatctagagggccgcatcatgtaattagttatgtcacgcttacattcacgccctccccccacatccgctctaaccgaaaaggaaggagttagacaacctgaagtctaggtccctatttatttttttatagttatgttagtattaagaacgttatttatatttcaaatttttcttttttttctgtacagacgcgtgtacgcatgtaacattatactgaaaaccttgcttgagaaggttttgggacgctcgaaggctttaatttgcgaattacaatagtatgtctgatgtctgcaagaagtaacaggcgtgtgcacaagaatacgtgtgtgtgcgtaagcgtatgcactggtggcataacttatctaagaagtatatatcactgacatagaaatgtagatatacaggtatttttctcgataatcgataaaaatctcgtcgcgctgaaccaaacttggtggttacggagagtttttctctcatcattactgtctttcgcattgatttcccctttgaccgataaaatcccttggattcataagattaaacaaagaggtgatcaaagagaaccctgtgaaagtttatgtttataaccgggcataaagtgaactagacactttcaagaagccaaccaaagcatgagtaacgaagcttaccagcatgatcataccgtaaatcctcaccag

SEQ ID NO: 281 - DNA, 2479 bp, Artificial Sequence
  PT104 (Fgf20::pGAL-PT104-cyc::Fgf20)
cccaaagctaagagtcccattttattcttctatatgtatattttcgatactctaaaccaccctacaatgtagccctatactaaatctgctcaattttcagcttctacaagtgactcgagaccacgtggaaagatccaactactccagcacaacgattcaatataatcgattgctccactcataagaggcaagaacaagcttcaacttttggtaagccgccgtttataaacagggaagatgtcctttgtcaagggaggcacagagcatggccaatttggcaaattgcggattagaagccgccgagcgggtgacagccctccgaaggaagactctcctccgtgcgtcctcgtcttcaccggtcgcgttcctgaaacgcagatgtgcctcgcgccgcactgctccgaacaataaagattctacaatactagcttttatggttatgaagaggaaaaattggcagtaacctggccccacaaaccttcaaatgaacgaatcaaattaacaaccataggatgataatgcgattagttttttagccttatttctggggtaattaatcagcgaagcgatgatttttgatctattaacagatatataaatgcaaaaactgcataaccactttaactaatactttcaacattttcggtttgtattacttcttattcaaatgtaataaaagtatcaacaaaaaattgttaatatacctctatactttaacgtcaaggagatgaacttgaagtacaagcactctttgaagaacaccttcggtgaaagaaagaccatcatcagatctaagttgttggagtcccattcttctgaagattggcatttgtctgaccccaagaaagaaaatggtgttgttggtaaaacccagaggggtattttcaaaaagtgggatattttgtgcaggttcgttcacccatatatcgttatggctactattatcggtgtgacctctttttctttgttgccattggaatctgctgccgatttgtctttgccatttttggttggtgtcctgaaaactttggttccatacgttttgttgaacatctacaccggtggtattaacgccttgtacgatattgaaatcgacaaggttaacaagccatacagaccattggttactggtgaattgtctattaagtctgccaccgttatagtttctactgctttggttacttctttggccatgggtattatgtctcaatctccacctttgttgtatggtttggttgctgtttttttgggtacttccgcttactctatcaagttgccattattgagatggaagaacaacccattcttgaccgctgttgctattttagttggtagaggtgttacccacgtttcctattatgttcatacccaagaatacgtcttgggtagaccatttgttttgaccagatctttcgttttcgctatcgccattatgtctttgttcgctgttacattcgctttgttgaaggatgttccagatgttgatggtgatagagaatctggtgttcaatccttctgtattttggccggtaaagaaaaggttttctggttgggtatttccatcttgttgatgggttatggttctgctatggttgttggtgcttcttcttcttgtttgaccaacaaattggttaccgttttgggtcatgctgctttggcttcatctttgtggttgagagcacaatctgttgacttggactctaaagaatctacctcctccttgtacatgttcgtttggaagttgtactacgtcgaacatttgttgatccacttcgtcagatgataactcgagcatgcatctagagggccgcatcatgtaattagttatgtcacgcttacattcacgccctccccccacatccgctctaaccgaaaaggaaggagttagacaacctgaagtctaggtccctatttatttttttatagttatgttagtattaagaacgttatttatatttcaaatttttcttttttttctgtacagacgcgtgtacgcatgtaacattatactgaaaaccttgcttgagaaggttttgggacgctcgaaggctttaatttgcgaattacaatagtatgtctgatgtctgcaagaagtaacaggcgtgtgcacaagaatacgtgtgtgtgcgtaagcgtatgcactggtggcataacttatctaagaagtatatatcactgacatagaaatgtagatatacaggtatttttctcgataatcgataaaaatctcgtcgcgctgaaccaaacttggtggttacggagagtttttctctcatcattactgtctttcgcattgatttcccctttgaccgataaaatcccttggattcataagattaaacaaagaggtgatcaaagagaaccctgtgaaagtttatgtttataaccgggcataaagtgaactagacactttcaagaagccaaccaaagcatgagtaacgaagcttaccagcatgatcataccgtaaatcctcaccag

SEQ ID NO: 282 - DNA, 2413 bp, Artificial Sequence
  PT273 (Fgf20::pGAL-PT274-cyc::Fgf20)
cccaaagctaagagtcccattttattcttctatatgtatattttcgatactctaaaccaccctacaatgtagccctatactaaatctgctcaattttcagcttctacaagtgactcgagaccacgtggaaagatccaactactccagcacaacgattcaatataatcgattgctccactcataagaggcaagaacaagcttcaacttttggtaagccgccgtttataaacagggaagatgtcctttgtcaagggaggcacagagcatggccaatttggcaaattgcggattagaagccgccgagcgggtgacagccctccgaaggaagactctcctccgtgcgtcctcgtcttcaccggtcgcgttcctgaaacgcagatgtgcctcgcgccgcactgctccgaacaataaagattctacaatactagcttttatggttatgaagaggaaaaattggcagtaacctggccccacaaaccttcaaatgaacgaatcaaattaacaaccataggatgataatgcgattagttttttagccttatttctggggtaattaatcagcgaagcgatgatttttgatctattaacagatatataaatgcaaaaactgcataaccactttaactaatactttcaacattttcggtttgtattacttcttattcaaatgtaataaaagtatcaacaaaaaattgttaatatacctctatactttaacgtcaaggagatgagccccaaagtatccagcatgccctacacaaatcctagatacgagagcgggccattatccttgatccctaaatccatcgtaccgtatttcgaacttatgaggttcgaactaccacacggttactatctagggtattttcctcacttagtgggaataatgtacggagcttcagcgggtcccgaacgtctaccagctagggatcttgtttttcaagcgttattatacgtgggatggacttttgccatgcgtggagcagggtgtgcctggaacgataacatcgaccaggacttcgatcgtaagacagagaggtgcaggacaagacctatcgcacgtggggccgtgtctacaactgctgggcatatttttgccgtcgcaggcgttgcactagcatttttgtgcctaagcccattaccgaccgagtgccaccaacttggtgttttggttacggtcctaagtgtaatatatccattctgtaagagatttacgaactttgctcaggttattttgggtatgacattagcggcaaattttattttagctgcatatggagctgggcttcccgctttggagcaaccatataccaggccgactatgtttgcaactcttgcgatcacattgttagtagttttctacgacgtggtctacgcaaggcaggacaccgctgacgatttaaagagcggtgtaaaaggcatggccgtactgttccgtaatcacatcgaggtcctgttggctgttttaacatgcactattggaggactgctggcagcaacaggcgtgtccgttggcaatggaccctattattttctattctcagtagcgggtttaactgtagcattactagccatgataggtggaatccgttacaggatatttcatacgtggaatgggtacagtggatggttttatgtcttagctataataaaccttatgtccggttattttatcgagtacttagataacgcacccatactggcacgtgggtcctgataactcgagcatgcatctagagggccgcatcatgtaattagttatgtcacgcttacattcacgccctccccccacatccgctctaaccgaaaaggaaggagttagacaacctgaagtctaggtccctatttatttttttatagttatgttagtattaagaacgttatttatatttcaaatttttcttttttttctgtacagacgcgtgtacgcatgtaacattatactgaaaaccttgcttgagaaggttttgggacgctcgaaggctttaatttgcgaattacaatagtatgtctgatgtctgcaagaagtaacaggcgtgtgcacaagaatacgtgtgtgtgcgtaagcgtatgcactggtggcataacttatctaagaagtatatatcactgacatagaaatgtagatatacaggtatttttctcgataatcgataaaaatctcgtcgcgctgaaccaaacttggtggttacggagagtttttctctcatcattactgtctttcgcattgatttcccctttgaccgataaaatcccttggattcataagattaaacaaagaggtgatcaaagagaaccctgtgaaagtttatgtttataaccgggcataaagtgaactagacactttcaagaagccaaccaaagcatgagtaacgaagcttaccagcatgatcataccgtaaatcctcaccag

SEQ ID NO: 283 - protein, 167 aa, Artificial Sequence
  RFP
MVSKGAVNKMRKVHMGSMNGHNGGGRYGTTAKKVTKGGSWDNSMYGSRATKHADNDYYKSGKWRVMNDGGAVTVTDTSDGTNYKVKRGTNDGVMKKTMGWASTRYDGVKGDNKMARKDGGRYADKTTYKAKKVMGAYNVDRKDNTSHNDYTVVYRSGRHSTGGMDYK

SEQ ID NO: 284 - protein, 531 aa, Artificial Sequence
  Alk1
MYKSDGVTNSDNVGNSGAAKRHGSTDNNANYGAATTWRNNTAHVSSHRMYYGCYKDGDAWMDTAGTNVGRRGKGSRYRDNSSSDSVSNVYWKTVDMNASDTCNRNSGDGHVGGWGAGNAKNCNVNRKRSNDTMVNWRDGNDDNKMTKRTVWVAHAKAGKGSANANDMMHVNANVNYANVAGCVVVSNADSANSTRKGSAKANTDNKRGKSYSKNVAASMANVNTKGSSSSTKRDGDNSWHDTVKDKDNAAVNATNGSSGTTGDKANWTATKAAADAWCHMDNRNGDVVAWTNGWMMGWVYASNGASNAYNGSGSGAKVDAKVTMGVNSNVRSWKSTNSVSGYDWSANRCGSTGASNVYWMGRAHYKNNYCGGTNGGGVTGSGASAASTAMGCSYNGNDGVNNGVGADVMGASSTNANHYDVYKGMNWNGKVRRHGDVRTSRGYYHAHGRADDTMNNGGNKVSSVNRNCNAVDNNVTAANGVAGGGVNAVVKNSDNTADNRMSNSAVKKNKVSKVVSRTATNKVMRRNRGAD

SEQ ID NO: 285 - protein, 524 aa, Artificial Sequence
  Alk2
MNYKADCNTSYDNAGNSKAHKANVNTHGAATATWNNTTHNSDSHYYGCYKDGDAWNDAAKVTNVGKTRGGSGYKDNSSSNSVSNVYWKTVNMSTSSVCNRNNGNHSNGGWGAVNAKNCSVNSKRSDDNVNRWCDGDGGVKSMTKRAVWVAYANAGDKGSANANDMMNVNSVVNYANVAGYNVVSNADSASNSARRNSKAKANTDNNRGDKSNYSRVNDAAANVNAKGSSSMKRDGDNSWDRVRKKNAAVVATNNSSGTTGKANWTNATKAAADAWCHMDNRKADNVAWTNGWMMGWVYASNGASVAYNGSGSGAKVDAKVTMGVVSNVRTWKSTNCNDGYDWSSNRCGSTGASNVDYWMGRAYKVNYCGGTNGGGNTGSASAASTAMGCKNGNDGCNNVGMGASNGASSTNANHYDVYSGMSWNGNRRHGDVRTSGGYYRAHGRADDTMNGGNKVSSVNRNCNAVDSNVTAANGVDGGHTNVVVKDSNYRDNRMSNSAVKKNKVSHVVSRTATNKVMRRVRKAD

SEQ ID NO: 286 - protein, 386 aa, Artificial Sequence
  Alk3
MKSGYGRDGNRSRVKDNSAVSRNSSSYNKANDADSGNSSKSTVAKVSHGHGNKKNDVVNANSNHVCGNNANGANATTSNYTVSSKVKDSNKNNTVWKVKGNTVMSAHKSVKKVTNGVNSGSASDSVNVKRSDTAVYSSGTTGTSKGVVTHGNNAASMVAMDNAKMHNVCVMHVGAVNTYSRGNAVVSMAKDKNMTVRYKNTHWVVNVAAKNSVVKKYNSSKHNGSGAAGKMCAKNNGVVNGYGMTTCGNVSVDTRGGKRNTGSAGTVSGVANVGVDTKNGNWVRGNMMGYNNATKSTMDKKGWVHTGDGYDDGHVVDRNKNKYKGVAAGVSHNDAVVNDAAGVVAYVVRSNSSTDVKNANVAKRRKVTNNSVKSASGKNRRNKRAS

SEQ ID NO: 287 - protein, 530 aa, Artificial Sequence
  Alk4
MYKSDSVTVNDNASGNSSANYRKVTNVDGYGAATSWNRNSKHVTNSHMMYYGCYKDGDAWMDSATNVGKHGKGSKYKDNSSSHSVSNVYWKTVDMCVNSVDCNHSTSSRNNGGKWGAVNAKNCNVNSKRGDDNVNRWRDGDDDVKSMTKVWVAHANAGRGSANANDMMNVYSVNNYANVAGYNVVSNADSANSTRKNSAKANTDNNRGKSNYSRVVAAMANVNARGSCSAKRDGDNSWSDRVRKKGDVAVVATNVSSGTTGKANWTHVTKAAADAWCHMDNHSGDNVAWTNGWMMGWVYASNGASMAYNGSSSGAKVDAKVTMGVNSNVRAWKSTNCVAGYDWSSNRCSSTGASNVDYWMGRACYKNNYCGGTNGGGVSGSSAASTAMGCRNGDDGHNDAGMGAGMGSSSTNASHYDVYKMSWNGNRRHGDVRTSRGYYHAHGRADDTMNNGGNKVSSVNRNCNAVDSSVTAANGVADGGRVNAVVKDDNATDNWRKSNSAVKNNRVSHVVASARTASNKVMRRVRKAVD

SEQ ID NO: 288 - protein, 468 aa, Artificial Sequence
  Alk5
MMYYGCKDGDAWSDAAMTNVGRRGKGSAYKDNSSSNSVSNVYWKTNDMSNSSVCNSNTSRSSANGGWGAYVNAKTCTNCKRNDDVVNRWRDGNDDMVSSTRSVWYAVAYANAGDRGSANANDMMNVSVNNYANVAGHVVVSNADSANSTRKNSAKANTDNNRGDKSNYSRVVHAAMANVTKGCSSMNRDGDNSWHDKATDRGDAAVVATNNSSGTTGKANWTHTKAAADAWCHMDNRKGDNVAWTNGWMMGWVYASNGASNAYNGSGSGAKVDASVTMGVNSNVRNWKSANSTSGYDWSANRCASTGASSVDYWMGRAYKNNYCGGTNGGGVSGSSAASTAMGCSNGDDGHNNVGMGAGMGASSTNADHYNVYKGMWNGKNRRHGDVRTSRGYYHAHGRADDTMNGGNKVSSVNRVCNAVDSNVTAAVGVGGVNAVVKDSDSTVDDKRNSYNSAVKKNRNSHVVSSRT

SEQ ID NO: 289 - protein, 533 aa, Artificial Sequence
  Alk6
MAGKTDSNTSDNAAGNSAKHTNNTSCGAATTWSRNSKNDYSHMMYYGCYSHGDAWDNVMTNVGRRGKGSRYKDNSSSDKSVSNVYWKTVDSNSSVCVYDNSRNGSYGGWGANNARNCSVNDKRTDDTVVNWHDGDDGMNNRMTRRVWSVAYADTGKGSANANDMMNASSVVNYANVAGYNVVSNADSASRNSTRKNSNAKANTDNNRGDKSYSRVVDASTANVNAGGSSSMKRDGDMSWHDRANNSRDDAANNAMNNSSGTTGKANWTNATKAAADAWCHMDNRKGDNVAWTNGWMMGWVYASNGATNAYNGAGSGAKVDAKVTMGVNSNVRTWKSTNCTAGDWSSNRCASTGASSVDYWMGRAYKNNYCGGTNGGGVTGSASASSTAMGCSNNGDDGNDASGMGAGMGASTTNADHYDVYKGMNWNGKVRRHGDVRTSRGYYRAHGRADDTMNNGGNKVSSVNRNCNTVHSSVTAANGMAGGRMNVVVKDSNNSNDNRNANSVKKNRVSHTVVSRTATNKVMRRVRASSTSK

SEQ ID NO: 290 - protein, 529 aa, Artificial Sequence
  Alk7
MAAHKGANTADDAAAAGCDATAHSARRADSHGAAVWACRSVRSVAVHRMYYGCAGSTAWTDKAATNVGRVARGRDNGDAYKDNTSDHKSNNTYWKMVMGVSVSCNWRNAAYGGWGANAAANCTAKGRSSDSANVWRDGKDSNMSRKKSSVANADAKGSANANDMMDVNAVVNYANVAGYVVVSNADSAAANSMRKNSAKANTDYNRDDKYSRVVVKAMANVNVRGSNKGRVDDSWDGRVNNTANYNAVKADATNNSSGTTGKANWTHNTKAAADGWCHMDNRKGDVVAWTNGWMMGWVYASNGASMAYNGSNSSGAKVDAKVTMGVSNARTWKNTDCTAGDWSSNRCSSSGASSVDDYWMGRAGYKVNYCGGTNGGGVTGSASASTAMGCNNDSNGNDSVGNGADTGSSTTNADHVYNGMWHGKNRRHGDRTSDGYYRAHGRADDTMNGGNKVSSNNRNCNRVHDANVTAANGVVGGGTNAVVKDSSDWNKANVAKKNKVSSVVVVSRTASNKVMRRVRKSAAAKHSKN

SEQ ID NO: 291 - protein, 529 aa, Artificial Sequence
  Alk8
MAYKSDANSVSDNAGNASAAKKNSDNNTHYGAATTWSRNSKRNDSHNMYYGCYKDGDAWDKTAGTNVWKKRGYGSNYDNSSSASVSNVYWKTVDMSVSSVCNRDSSNGGWGAHNAKNCSNSSSSNDVANTWRDGSDHVSCMTRTVWSVAYANAGDRGAANANNMMNVKSVNNYANVAGYVVVSNADSAVNSTRKNSAKANTDNNRGKSNYSRVVDASMANVNTKGSNSMKRDGDNSWRDRVNNRGNAAVVAYTNNSSGTTGKANWNNATKAAADAWCHMDNRKGDNVAWTNGWMMGWVYASNGACNAYNGSNGSGAKVDAKVTNGVNSNVRTWKSTNCTAGYDWSANRCGSTGASNVDYWMGRAHYKNNYCGGTNGGANTGSSAASTTMGCSNGNDGYNHNVGMGAGSMGASSSNGDHYKVYYKGMVWNGKNRRHGDVRTSRGYYHAHGRADDTMNGGNKVSSVRCNAADSSNTAANGVGGRVNAVVKHDNSTDKKSNSVVKKNRVSRVVSRTATNKVMRRNRRVRNSK

SEQ ID NO: 292 - protein, 540 aa, Artificial Sequence
  Alk9
MGVSGATDTNTHMAYYKSSSNTVSDNSHGNARDAATHGANNTHSNGTATWHVSNSNNSHMYYGCYKDYGDAWNNRSAATNVWRKGGSAYKDNTSDDKSVSNNYWKCVWDMSNSSKCNRDSSGSSHSGWGASNNANCNVNGKRSNDTVNNWRDHDDRRMTRVWVAYASGKGSANANDMMNVKSVVNYANVASYVVVSNADSAASNSTRKNSKAKVNTDNMRGDKSNYSRVVDASMAVVNAKGSSMKRNGDSWHDKVNNKGKNATNTTNNSSGTTGDKANWTNNTKAAADAWCHMDVRKGDVVCWTNGWMMGWVYASNGASMAYNGSGSGAKVDAKVTMGVNSNVRSWRSTNSTSGYDWSSNRCGSTGASNVDYWMGRAYKNNYCGGTNGGGVCGSASAASTAMCCSNDDGNNVGNGAGMGASNTNADHYGVYKGMNGKVRRHGDVRTAKGYYHAHGRSDDTMNGGNKVSSVNRNCNGVDSSNTAANGVSGGGTNAVVKDSNSTNDHRMSNSAKKNRVSVVTSRTASNKVMRRVRSTNNSKN

SEQ ID NO: 293 - protein, 311 aa, Artificial Sequence
  Alk10
MANVNNRSSTSNRDGDNSWDRVDKSKVYNGVVASTNNSSGTTGKANWTATTRAAADGWSNNGKDDVVAWTNGWMMGWNYSTNGATMAYNGSGAGAKVDAKVTMGVVSNVRAWKSTNCTAGYDWSSNCHASTGASGVDSWMGRAYKNNNCGGTNGGGNAGSSSASTAAMGCSNGDGSRDSGNGAGGASSTNADHYGVYYTGMVWNGKVRRHGDVRTSRGYYRAHGRADDTMNGGVKVSSVNKVCNAVDSNTAAVGVGGGDKVNAVVKDSKGSKDNNSKVSNSAKKNKVSHNVVHSRTATNKVMRRVRSVGSK

SEQ ID NO: 294 - protein, 520 aa, Artificial Sequence
  Alk11
MAYKSNSNTKSDNAGNSGDVSKRDDNNHGSSTTWNNSRRNHNSHMMYYGCYKDGDAWNDKVASTNVGKKRGKGGNYKNVSSSSSVSNVYWKTVDNNSVKCNKDTSGDNGGKWGAYNARNCTNGKRRDDNVNRWRDGSDDVNTMTRSVWAAHASAGSANAVDMMNVSVNNYANVAGHVVVSNADSSRNSTRKNSKAKANTDVNNRGDKSNYRRVVDAAANVVARGSSCRMKRKDSWNNGNARNRGVYVAAKAGAYTNNSSGTTGKANWTNNSKSAADAWCHDVRGDVVAWTNGWMMGWVYASNNGACMGYNGSGTAKVDAVSVGVNSNVRTWNSNSTSGYDWSRNRCGSTGASNNDYWMGRAHYKVNYCGGTNGGSNSGSSAASTAAMGCKNDDSNNYAAGVGACHMGASSTNGNHKVYGMTGNRRHGDRTSKGYYRAHGRADDTMNGGNKVGSNNRVCNSVDDSVTAANGVSGGVNAVVKSSNDNKKSNSNKKNKVSSVVTSRTATNKVMRRVRTTGNSK

SEQ ID NO: 295 - protein, 528 aa, Artificial Sequence
  Alk12
MSNVDAGGHARSHWKNSRASGSSSNWRSSKNVASHRHYHSCYKNWDSARGVWNSAAKSTNGRTMDTYGRDGCSDNTNARSVNDVYWRNVNVSRNDMRNNDGCGGWCATNAACCSRCRKANTANWRDGNDTGNSTSRSSCRVANSRGSSGDAVANNMMTVSVVVYGNVCGCVVVSNADSSSSNTRNNSKAKANTDVNVRGGKDAYTRVVDANARAVNGKAGATVRSNDMSWDAVSTGARYKGVASGASNNSSGTTGDKANWTHTNKAAADGWAHDNRSRDVVSWTNGWMMGWVYATVNGATNAYNGSGRGAKVDAKVTMGVVSNVRHWKTTKCDDNDSHNRRHSDCSTGASTVDDYWMSKASYKVNYCGGTNGGGVTGSAASSTAMGCDVNDAGNSMGNGCADSSMGASRNNANHNNYKGMKHNGKTRRHGDRTGGYKAHGRVDDTMNGGNKVSSVNRNCNAADRVTAANGVSTGGGKCVNAVKAVTDKTDNSSKRNAANRKNKANNAGSRTASNKVMRRTRSSTKRTS

SEQ ID NO: 296 - protein, 515 aa, Artificial Sequence
  Alk13
MSGTNDVSAHVKAGSRDAGVAANVTRRSSNNWRNSKRWHHYYSSYGDWDVSTRGGWNTNARSNGRNRKGRVGKYRSTSRWSHYVWHSNHHRCDTSDANGGVWGAHNVACCAAKGSKTDSSNANMYRNGDDVRNTSRADVSRVANSAGKKGDSNANDMMNVAVTAYANNAGCVVVSNDSVAKNANRNRNSKAKANTDVNRGGKKYSRVNSKAANVADGKASSSRNGDSWDVRAHSRDYKVNSMDSYTNNSSGTTGKANWTHTRCAADSWAHDSRGDVCWTNGWMVGMNVYSAVNGATAYNGSDRGGKVDAKVTMGTVSVRAWKASGCMANDWTANRAGSSGTSSVDDDWSAAGYKVCCGGTGAMYVGGNVAAASTVGMTRNYNDDSNNYDAACTGVHHNGSSSTNADHHKVYYGMHNGKRRHGDNRHGGYKAHGRSDDTMNGGNKASANNVCNKAHSVTAANSVRGGVNAAVKGYNNSSKKNSHVMSNNKVRAVAVDRTASNKRRVRNCAKYSASR

SEQ ID NO: 297 - protein, 549 aa, Artificial Sequence
  Alk14
MAASARGSVWNRDVAAGAAADAAAVAARSAAAAAGSGATRDAVWAAVAAAGVRHHAHVYYSTYAGWDRDARGYWSNDCKTNGRMANGKGSSYKDNSSSHYRSVNVYWSMVKAVNKRSNSTSDRSKKGGTWGAVNNACCCSKRTDDSTANNWRDGDDYVNRMSKRGVNTVAHADAMKGDRNANDMMTCNAVNNYANNGGVVVSNADSANGSRMGVSKAKANTDNVRGGKKVYSRVVGTSSKAVVNANGDSNGNTRNGDMSWKDSRAAGRSSSYSVYSVDATNNSSGTTGKANWTSNRCASDTWAHDVRCNGCWTNGWVMGNNNYSCNGAAAYHGSGRDCKVDAGVTVGSVSVKSWKAGNCAGDWTKNRVGTTGASDNDDNWTSRASYKNVCCGGTASSYNGSRVGASGASMSTGVNDGTYDDVCTGVGYGASDRNANHDKVYDGMNYKGRRRHGDNNRTVGGYYNVGRADDTMNGGNKTSSVNRVCNRADCTAAVSNKSGGGHANAVKDRSAYDVNKRKTANKNNKVSYVKVVRTASNKRRVRDASNRSK

SEQ ID NO: 298 - protein, 486 aa, Artificial Sequence
  Alk15
MAKSNSCGVDTNAAANNNSASNVDCWYNKGVKNYHYHTVSDWSSKGAWNSKNATNNAAMKDNASHSHAWSVNCAWVMNRNNCAKYTNVDSHGVSWVNARNNASCARNNTANNWGGSSTTYGATNRVANSNVGAGDRANAMMTASVANYGNNKAGCVVVSNADSAGNANRSAKANTDYNRAGKHYAKNNDANAKANVANNSSTVKRDSWDSDANVHDAYTNNSSGTTGKANWTHTTNKCGVDGYHHDNHDVVAWTNGWMMGWNYASNNHATNAYYGTTRGRVDGRVNNGVVSVNTWKVTCMGDWSANRASSTGCSTDMMSAGYKNNYCGGTNGGGYTSTVHCSSTTTAGDANVDNGHAADRGANNSNGSTNKDHHVYADTSNANSSNTRRHGDRRNSYYRAGRADDTMNGGNKVSSANRVSTVKGNSTAANANSTGGSNNYAVVAWTDRDTMVSTANKHNKNSDVSRTSSNKVMRRVRDYHNKYSTV

SEQ ID NO: 299 - protein, 530 aa, Artificial Sequence
  Alk16
MGMRVAVGVGVKAGSMARNKAAVGGARGSDSVWRVVARRVSSHHGHRVHSVYAWDSNRGYWSYSMHTNGRMTYGRGSYKDNTSYSKSVNVYWSMVKSVHRARCNDTTDKSKHGGTWGAVNNACCVSYRKHDNSAVVWRDGNDDSVNRTKRVMMVANVDATSKGDANANDMMTVHAVNNYANVAGVVVSNADSAAKNATRHVSKAKGNTDNVRGGRKYSRVVAAHKVNVANGTDVDVRDSWKDSHADHRNNYSVYNDAVTNNSSGTTGDKANWTVSNRSSADAWANNNVGDVCWTNGWVMGTNYASTGAAAYHGSDRGGKVDAGVTVGTVSVKTWKNTGCMGDWTKNKSASTGTSNVDDDWSSRAYYKNNCCGGTASSYNGSVAGTSTAAMTTGVNDNGVYDDCVGVGNMGATDWNADHVYKGMMYKGMHRRHGDNNKRTVGGYVVGRADDTMNGGNKTSSVNRVCDKADSVSAANSTANGGVVVVKKGYDCNKMKSKANRNNKVNVKNVRTASNKNRRVRDNKHSVRSRN

SEQ ID NO: 300 - protein, 519 aa, Artificial Sequence
  Alk17
MGGAKSVDVGDSAGSAHYVARAGGKSNWRVSSTRHHAHMYYSNYKNWDCGYWSARSTSNGARGNGNKAYVDNASTNYKSVHNWSNAKSHSVKMVDSSDSSRAGKWGAVNNACCKSNGKTDDSNANNWRDGGDDSTMKSRHHVSRVASAAGRGDRNANDMMHNHAVNNYANNAGCVVVSNADSVSSNAARANSKAKGNTDVNVRGGKANYSRVGAKKAVVSDGKSVRVNRNDVSWANGNGTNRSGDAVVSWTNNSSGTTAKANWNTTMRCAADSWAHDAGDNYCWTNGWMVGYNNSACSGATMAYNGSGRSGRVDARVTNGTVSMVKTWKKVNCMDSDWSSNRSGTTGASSNDDDWSARAWYKNCCGGTGSAHGSAAASTSTTAVDDSGRYDDCSGNAKGASYTNADHHKVYGMVNNGNRRHGDVRMAGGYKAKGRADDTMNGGVKVSSVNRVCNTAHSSVTAANAMGKGGGDNNVAAVKGAGNHMKRNSKAHDNNKVHAVVRTASNKNMRRVRAMARSK

SEQ ID NO: 301 - protein, 473 aa, Artificial Sequence
  Alk18
MTMAKSVTCGVRANAMAMNNCASSVDCWCTKKVKYADYTVADWDSGVWAANKTTNNSAMKNSSYHCWSNRAWNMNRNNYHKYRHNDDGNSWVGAKNNVASCAKNDSANNWRGGCHTYGDTNRVANGRDVGTGDSNNAMMTASVANYGNNKAGCVVVSNADSAANANRSRAKANTDYNRAGKNYSKVVDAAAANVNDCYTVKRNDWASAVVTGAHTNNSSGTTGKANWTTTKCANDGHHHDNHRNNAWTNGWMMGWNYASNNRATNAYYGATGRAGVDAVTMGVVSVNTWKTTSCMGDWSGNKASSTGCSAMMSAGYKNNYCGGTNGGGYTGTVCAATTTAGDVNVDNGHAANKGANNANGSTNKDHHVYANTSMSRRHGDNHNSYYRAHGRTDDTMNNGNKVSSVNVNTVAGVTAANAVSSGGKVNYVVKNVVDKAMNSMANKHNKNSDANVGRTASNKVMRRVRDYKRKDDR

SEQ ID NO: 302 - protein, 393 aa, Artificial Sequence
  Alk19
MKSGYGRDGVRSRVKDHNSMVSVRNSSSYKANDSDTNTSSKSMVNKVSHGNGVKNDVVNANSNHVVCGNVASGANATTSNYTVSSKVKDSNKNVTVKVKGNTNNGNSDSSKSRAKVTHDVTSGVSDMVDKSDTAAYSSGTTGMSKGVVSHKNNASSMVTMDAGMHNVCMHVGANNTYARGNTVNSMARDKNKDVKYKVTHWVVVNATKNSNVKKYDSSKHNGSGAAGKDMCAKNVHGNVAGYGMTTCGNVSVDTRGGKRHTGSAGMSSGVANVSVDTKNGNWVRGNMMGYNNRATKTNDKKGWVHTGDGYDDGHYVVDRNKNKYKGVAAGVSHNDAVVNDADAGVVAYVVRSNSSTDDVKKNAGVASKRRKVTNNSVKSASGKNRRNKVRSNN

SEQ ID NO: 303 - protein, 417 aa, Artificial Sequence
  Alk20
MGMMRNVNGSVHAARYHGARVVSVTSGVTRSCWKVRARKASAGKMGTSDRCATNAWNNNRHVYYAVSGAGMVCHTNNRNNTYVNNHADKVVDDTNNANHGSKVKAVMAHNNSNASAMGNAYDNGGDDNYNWDVDNASSCYTSGTTGNKGVYSHRSTVHSMTTAMDTNSARDTNVVMHVNAWGTYSAAMVGAKVGADGASSKNASGVSNAGVVVWGAAAGNGSKSSTRVVVGGSACASMNRNDNYGVVNHAWGMTSGTANTAHHVDSDKSRKSGRYGVKNVNDGNRDGRSKGNMARGHWVNKDYHSDGSTSDGWSTGDVATNDSDGMTNCDRAKDNNKSGGWNSTVSNANAHHNVDAAVNAARHKWDRNAVKSNSTSGVCNYADKVARWNDAANVRNGTGKNKNRRKYGDNRSSSSVC

SEQ ID NO: 304 - protein, 415 aa, Artificial Sequence
  Alk21
MHWRKVGCTWGTMSSRTYNNSRVSWGHVAKNASDVDHWADMKAGKRSAWWVNGKGKMWNRSNSAANNSGACGRGDRVAVMRVWWVNGCNRAGNMGTNMKSTDNYRMSKAKANVAGDVNVDTVASCSRNKVSKSCDGWNKKNASTTHHCVTGSASANYTSGTSGKMAHSYSSGKAKMDAGWTGASDNMWTNSDTGWNNNGSSWTGACTVHKDVNKTSSYNKSMMGANVYRMDSSYKHNCAGGSTNWRATGDNRYGTTGTCMVSKTMKNKGYMGTAASCYDVVNDDKGNVGTGDNGNRVKNRNGNSGYVNDKTAANNRGDWGDRGNKDDGYMGRADDNNNSSGYRNGSVNAMKHAVVTAVNSSDVRGVVKAVNASSHDTKHVKSVTAYKYRKNVNKTVTGKNRTKRDKWKMSGKARA

SEQ ID NO: 305 - protein, 431 aa, Artificial Sequence
  Alk22
MARVTRKMRHAKCRANGSVRAHKDNRTATNSNYSMKDKGNYNAKDVDWTDKKAGKKSNAWWNNRNGMRWSGSSRKANNSACSRGDRVNNRVWWANVACRTGTVNGTTTKDNYRSSKANCNNTNDVAAVDAVASKCNHSKNVSNSRGWGNKMKHASDSHTCVKTKHNNMANTSGTSGYKMTAHTHSSGGSVNGRWDTSDVMWNTSDTGWAKSAWSSVSWNGACVTHHRTSNTSKYNTVCSATVYRMVNDNTSYKKSKHCVSAGNTDVTKWRNKTGDNYGYGTTVNCGNKGMKNKGSMGKSADVKNVDVNGNVGGDNGNVNRGTHYVDNSKTASTRGNYNTGDRGYMDKDGYWVARADDVNSSGYRNGVNANHSVASAVVSSDNRGVVKAVVNDYKSHDNKNHVKKTTAYKYRKVNKTNSGKTKRNRKKWKTN

SEQ ID NO: 306 - protein, 410 aa, Artificial Sequence
  Alk23
MDNVCANNVTNTKRASCYNRTSNNYGTRTWTYDRCCRAASSNNTRNDVVSNANVAMYMHSVMTGAVNNNTRDAKTNANNRHAKNVDYANVRNTYSHRNNNNNDSTTKSKDYGNRKGTSSSASMRVHNHDNSNYTSGTTADKGVVNSHGAYSASSNNGWMGNVYWTMHCNGWTHTWSVAARGGTNVCNRHVTANYKNNHGVTHMSCVTVRGSRTDSKSSVVTGGSSAVNKKVGHVMHGYGTATGVCWDWNKHNRGVRNTADVDVKNTKTSVRDGKTMGNVNKGSSMKGYKNKATSAKHGWNTGDNGVNHDGYVNKDRSKDNNNSGGNNSSNVKVYMYVAAVVAMHWGTCAVVKKGGVTSGDNKYCRNMHMCKKVVKNSNGKNKSKRDNAKAVVRDDAGSKKVHRSNHVSSR

SEQ ID NO: 307 - protein, 417 aa, Artificial Sequence
  Alk24
MHWRKVGCTWGTMSSRTYNNSRVSWGHVAKNASDVDHWADMKAGKRSAWWVNGKGKMWNRSNSAANVSGACGRGDRVAVVRVWWVNGCNRAGNMGTNMKSTDNYRMSKAKANVAGDVNVDTVASCSRNKVSKSCDGWNKKNASTTHHCVTGSASANYTSGTSGKMAHSYSSGKAKMDAGWTGASDNMWTNSDTGWNNNCSMWAGACTVHKDVNKTSSYNKSMMGANVYRMDSSYKHNCVTVGSTNWRATGDNRSYGTTGTCMVSKTMKNKGYMGTAASCYDVNNDDKGNVGTGDNGNRVKNRNGNSGYVDNDKTAANNRGDWGDRGNKDDGYMGRANDNNNSSGYRNGSVNAMHAVVTAVNSSDVRGVVKAVVASSHDTKHVKSVTAYKYRKNVNKTVTGKNRAKRDKWKMSGKARA

SEQ ID NO: 308 - protein, 408 aa, Artificial Sequence
  Alk25
MWMRRTWGNHKSHNNHASRCRSSGARWNDYVNASYVDYWAKKGKRGNAWWVNGGDVKWSRMGDTRRVANVTTCGGDHAMRVWWVAVGCMRTGNNNATNKAKDNYRSKAKGNVTNDAASVDSNASCSKTKVSDHSRGWDRSVKSASHTCVKSKTDMVNTSGTTGKMAKHSHGASGSRKRSKTSDVSWCSDSGWNVATNWTVWTAGCTVNHHDTKVNNTKYNNHWGVSSNYRMNDTSNRAHCYTGGVVKDWKRRTGYNYGSTGNCATYWGMKNKGMGKATYDVVNDDKGSNNTGNNGNRNKVRVSMCYGDKTAKVCGDYNTGDRGKMDGYNCGRSDDNNNASGYRNGAVSAVHAVASAVVGSDNRGVVKANVTSHDKDTKHVKSVTAYKYRKVVSKTNTGKNRKRKKTGM

SEQ ID NO: 309 - protein, 348 aa, Artificial Sequence
  Alk26
MDRYKKVSADAVKNKSGDWVDYGWCTNTVDADAAKRTDTDVKRGGNMKAVARDAGHCWNSWHMSGNRKMNNRGVAYYCNRYSRYYRDCDDVAMVAMDAHGYNGSASHGAMCRAKHNNVVNNMRCGGTCGNHNSDVTYNVGSNNGGAGGATDVDKAVAKNVDNNGACGNGGMNAVGSNASDKDGVHTMYVDAVDNAKAGKNNGSKKNNDRYRTYAGAGTKKMYDYDDNMSAVDYTNDNRSNSADNNSNNNAVDNDYGVNASAGNKNSGAGGDVGAYSKGGKSNCSSTKTKDGVSRNRTANGSNVTDARNTHYVVTYGKVNKGSTWRAANSNAHDRDDNKAMHNWRRSNR

SEQ ID NO: 310 - protein, 341 aa, Artificial Sequence
  Alk27
MSNKYAKVTAAVKVVKSHDWVDYGWTTGTVADAAAARADDVKVRGGNRNKVDNVAHTWNSWHMGGRKANSKGAYSKYSRYYRNNKHNVAMVAMDKHGNGNASHMMAVCTADVNNVVNNMRCGGGNHNSRVDYNVGNANGGAGATVDRAVANVNNGACGNGGMNTVGSMNASDKDGVHTMYVDAVDNAKAGKNNGKKNNDKGRVYAGAGTKKMYDYDDNCMSAVDYTNSAKTNANDNNSNNNAVDNDYGVNASAGVKNSGAGGDVGAYSKGGKSNCCSSTTSRDGVKHTRNRTAGSTVTDTRNTHYVVTGKVCKGMSTWRAANSNAHDRDNKAKMNWRRSNK

SEQ ID NO: 311 - protein, 346 aa, Artificial Sequence
  Alk28
MDTYAKKMTADAAAVKSGDWVDYGWAVNTVAVDAANAKRDVNRGGNMWVANNDAAHMTWNSWHMGGNRKANAGSYSNRYSRYYRDSSDVDVAVVTMDHGYNGCASHGAVCDKAKKNNVVNRNMKCGGTNWVHNSVAGVVGSNNGMAAAGAATVDKVANNVNDGACGNGGMNANGNNASDKDGVHTMYVDAVDNAKAGKNTGRHKNDKGRVYAGAGTKMYDYNDNCMAAVYTNDNRSNSANDNNSNNNAVDNDGVNASAGNKHNSGAGGDVGAYSNGGKSNCSSTMNKKTGKSRNRTNGSNVTDTRANVHYCTYGCVNKGTSWKAANSVAHDRDNAAKHNWRRSNKR

SEQ ID NO: 312 - protein, 349 aa, Artificial Sequence
  Alk29
MGYAYKKVSADAVKVVKSGDWNDYGWCNGTADADAAKRTDTDNNVRGGNKTANRDAGHTWNSWHMSGNRKNSRGCAYYANRYSRYYRANTKKNAVAMVTMDKHGNGNASHAAVVTSATVNVVNNMRCGGTNNVHNSDVDNVGSNNAMGAGGASVDKAVAKNVNNNGACGNGGMNAVGSNASDKDGVHTMYVDAVDNAKAGKNNGSRKNNDRRAAGCGTKKMYDYDDNNSAVSYTNDNRSNSADNMSNNNAVDDGVNASAGTKHNSGAGGDVGAYSNGGKSNCCSSTYKTKDGVKSRNTNGSNVTDTRANTHVTYGNVNNKGSTWKAANNSNAHDRDNAAKMKNWRRSNK

SEQ ID NO: 313 - protein, 460 aa, Artificial Sequence
  Alk30
MSGYYNAKNAWSKKNWYKNKKAYTDDGYHWSDGNTCADHVVAGGDTANYDSVTHTKTSYSVAKAGVMSGVKKGDRVVNYMMNAVNGMACARNGANHSVVGGAAHAVRNDDAKKNSASCGVVCSVNYKNDNANATHKVHCNNYRKANATNNDRDNDWNTAMTAVATDVVNGNDYNYTSGTTGTKGVVRNGGHAVAMNYSMKTVYDMGDVWAASDNGWVVGHSYNVYAMYRCATVYGKVRTDASAWRVVYKVSASATARANKKDNADGKYNTSSKRAGRDTYWKKTKVDHWWTTGWANACNVGNYTTKSGSSTVSTGDVRNDMDGNCAANGAVVNKGCTNWDTRKASYSYGYYSGDGGYNDDDGYNMGRTDDVNNVAGHRSTGMNVAAHAVACAVGNNDKGMGMNVKDDVGSTKVAVAAVRNNGANACKNNVSVDRKTRSGKNRKNRVDGNSTNDDASNNNT

SEQ ID NO: 314 - protein, 245 aa, Artificial Sequence
  PKS80
MSTKKKNRNCDKSMNKKRYSHTMNHNNGAYMASNNRNNTAVKGKAAKAKWGKSKNTHVCTTSGVMGADYKANGTSVRRVMYHGCYAGGTVRTAKDANNAGARVVVCSNTVVTRGSTADSVGAGDGSAAVNVGSDDSNRVSAATNNTGANAGNRVGTHWNVTNSNNKCTADNGNNDWNSWNAHGGANDAVAKSDKKKATRHVSYGNMSSACVNMDMRKKSKKTTTGGDWGVGGGTNTVVHSNRDSN

SEQ ID NO: 315 - protein, 300 aa, Artificial Sequence
  PKS81
MASVDNRNARAKGATVANGTATDNCYSDADYYRVTKSHMTKKKNRNCDKSMNKKRYNHTMHNNGAYMASNNRNNTTVKGKAAKAKWGNSKNTHVCTTSGVMGADYKANGSVRRVMYHGCYAGGTVRTAKDANNAGARVVVCSNTVVTRGSSADSVGAGDGSAAMNNGSDDNSNRVSAATNNTGANAGNRVGTHWNVTNSNNKCTADGNSDWNSWNAHGGANDAVAKSDKKNATRHNSYGNMSSACVNDMRKKSKGKTTTGGDWGVGGGTNTVRKTSMMGRYNCSYMNKSSNYSKWKKRGN

SEQ ID NO: 316 - protein, 232 aa, Artificial Sequence
  PKS82
MSNKKRYSHTMHNNGAYMASNNRNNTAVKGKAAKAKWGKSKNTHVCTTSGVMGADYKANGTSVRRVMYHGCYAGGTVRTAKDANNAGARVVVCSNTVVTRGSTADSVGAGDGSATVNVGSDDSNRVSAATNNTGANAGNRVGTHWNVTNSNNKCNADNGNNDWNSWNAHGGANNAVAKSDKKKATRHVSYGNMSSACVNMDMRKKSKKTTTGGDWGVGGGTNTVVHSNRDSN

SEQ ID NO: 317 - protein, 258 aa, Artificial Sequence
  PKS83
MASVNRNARAKGATVANGTATDNCDKSMNKKRYNHTMHNNGAYMASNNRNNTAVKGKATKAKWGKSKNTHVCTTSGVMGADYKANSSVRRVMYHGCYAGGTVRTAKDANNAGARVVVCSNTVVTRGSVADSVGAGDGSAVVNNGSDDNSNRVSAATNNTGANAGNRVGTHWNVTNSNNKCTADGNSDWNSWNAHGGANNANAKGDKKKATRHNSYGNMSSACVNDMRKKSKGKTTTGGDWGVGGGTNTVVHSNCMDSN

SEQ ID NO: 318 - protein, 321 aa, Artificial Sequence
  PKS84
MSVGGYSDSYHGVKKCASTCTYGKGANTMVDSWWDTAVVNTSMASVDNRNARAGATVANGTATDNCYSDADYYRVTKSHMTKKKNRNCDKSMNKKRYNHTNHNNGAYMASNNRNNTAVKGKAAKAKWGKSKNTHVCTTSGVMGADYKANGSVRRVMYHGCYAGGTVRTAKDANNAARVVVCSNTVVTRGSSADSVGAGDGSAAMNNGSDDNSNRVSATTNNTGANAGNRVGTHWNVTNSNNKCTADGNSDWNSWNAHGGANDAVAKSDKKNATRHNSYGNMSSACVNDMRKKSKGKTTTGGDWGVGGGTNTVVHSNCMDSN

SEQ ID NO: 319 - protein, 251 aa, Artificial Sequence
  PKS85
MASVNRNARAKGATVANGTATDNCYSDADYYRVTKSHMTKKKNRNSHHTMHNNGAYMASNNRNNTAVKGKAAKAKWGKSKNTHVCTTSGVMVTVRTAKDANNAGARVVVCSNTVVTRGSTADSVGAGDGSAAVNNGSDDNSNRVSAATNNSAGANAGNRVGTWNVSNSNNKCTKADNGNSDWNSWNAHGGANDAVAKSDKKKATRHNSYGNMSSACVNDMRKKSKGKTTTGGDWGVGGGTNTVVHSVMDSN

SEQ ID NO: 320 - protein, 262 aa, Artificial Sequence
  PKS86
MASVNRNARAKGATVANGTATDNCYSDADYYRVTKSHMTKKKNRNCDKSMNKKRYNHTMHNNGAYMASNNRNNTAVKGKAAKAKNYKANGSVRRVMYHGCYAGGTVRTAKDANNAGARVVVCSNTVVTRGSDADSVGAGDGSAAVNVGSDDNSNVSAATNNSAGANAGNRVGTWNVSNSNNKCTKADNGNSDWNSWNAHGGANDAVAKSDKKKATRHNSYGNMSSACVNDMRKKSKGKTTTGGDWGVGGGTNTVVHSVMDSN

SEQ ID NO: 321 - protein, 287 aa, Artificial Sequence
  PKS87
MASVNRNARAKGATNANGTATDHCVYSDYADYYRVTKSHMTKKKNRNCDKSMNKKRYNHTMHNNGAYMASNNRNNTAVKGKAAKAKWGKSKNTHVCTTSGVMGADYKANGTSVRRVMYHGCYAGGTVRTAKDANNVGARVVVCSNTVVTRGSDADSVGAGDGSAAVNVGSDDNSNRVSAATNNSAGANAGNHVGTHWNVTNSNNNCTKADNGNSDWNSWNAHGGANDAVAKVGDKRKKATRHNSYGNMSSACVNDMRKKSKGKTTTGGDWGVGGGTNTVVHSVMDSN

SEQ ID NO: 322 - protein, 246 aa, Artificial Sequence
  PKS88
MSTKKKNRNCDKSMNKKRYNHTMHNNGAYMASNNRNNTAVKGKAAKAKWGKSKNTHVCTTSGVMGADYKANGSVRRVMYHGCYAGGTVRTAKDANNAGARVVVCSNTVVTRGSDADSVGAGDGSAAVNNGSDDNSNVSAATNNSAGANAGNRVGTHWNVTNSNNNCTKADNGNSWNSWNAHSGANDAVAKVGDKKKATRHNSYGNMSSACVNDMRKKSKGKTTTGGDWGVGGGTNTVVHSVGTDSN

SEQ ID NO: 323 - protein, 282 aa, Artificial Sequence
  PKS89
MAVNRNARAKGATVANGTATDNCYSDADYYRVTKSHMTKKKNRNCDKSMNKKRYNHTMHNNGAYMASNNRNNTAVKGKAAKAKWGKSKNTHVCTTSGVMGADYKANGSVRRVMYHGCYAGGTVRTAKDANNAGARVVVCSNTVVTRGSDADSVGAGDGSAAVNNGSDDNSNRVSAATNNSAGANAGNRVGTHWNVSNNNNCTKADNGNSDWNSWNAHGGANDAVAKGDKKKATKHNSYGNMSSACVNDMRKKSKGKTTTGGDWGVGGGTNTVVNHSVGTYSN

SEQ ID NO: 324 - protein, 298 aa, Artificial Sequence
  PKS90
MADYSNASTWKWMRVGTAVKCSACKGATVANGTATDNCYSDADYYRVTKSHMTKKKNRNCDKSMNKKRYNHTMHNNGAYMASNNRNNNAVKGKAAKAKWGKSKNTHVCTTSGVMGADYKANGSNRRVMYHGCYAGGTVRTAKDANNAGARVVVCSNTVVTRGSDADSVGAGDGSAAVNNGSDDTSNRVSAATNNSAGANAGNRVGTHWNVTNSNNNCTKADNGNSDWNSWNAHGGANDAVAKGDKKKATRHNSYGNMSSACVNDMRKKSKGKTTTGGDWGVGGGTNTVVNHSVGTDSN

SEQ ID NO: 325 - protein, 282 aa, Artificial Sequence
  PKS91
MASVNRNARAKGATNANGTATDNCNYSDYADYYRVTKSHMTKKKNRNCKSMNKKRYNHTKMHNNGAYMASNNRNNTANKGKAAKAKWGKSKNTHVCTTSGVMGADYKANGDNSVRRVMYHGCHAGGTVRTAKDANNAGARVVVCSNTVVTRGSADSVGVGDGSAAVNVGSDDSNRHNSAATNNSGANAGNRVGTHWSVTNSNNKCTADGNSDWNSWNAHGGANDAVAKNKKKATRHVSYGNMSSACVNDMRKKSKRKATTGDGDWGVGGGTNTVVRSNTVNN

SEQ ID NO: 326 - protein, 243 aa, Artificial Sequence
  PKS92
MATKKKNRNCKSMNKKRYNHTKMHNNGAYMASNNRNNTANKGKAAKAKWGKSKNTHVCTTSGVMGADYKANGDNSVRRVMYHGCHAGGTVRTAKDANNAGARVVVCSNTVVTRGSADSVGVGDGSAAVNVGSDDNSNRHNSAATNNSGANAGNRVGTHWSVTNSNNCTKADGNSDWNSNWNAHGGANDAVAKNKKKATRHVSYGNMSSACVNDMRKKSKRKATGDGDWGVGGGTNTVVRSNTV

SEQ ID NO: 327 - protein, 282 aa, Artificial Sequence
  PKS93
MASVNRNARAKGATNANGTATDHCVYSDYADYYRVTKSHMTKKKNRNCKSMNKKRYNHTKMHNNGAYMASNNRNNTANKGKAAKAKWGKSKNTHVCTTSGVMGADYKANGDNSVRRVMYHGCHAGGTVRTAKDANNAGARVVVCSTVVTRGSDADSVGVGDGSAAVNVGSDDNSNRNSAATNNSGANAGNRVGTHWSVTNSNNCTKADGNSDWNSWNAHGGANDAVAKNKKKATRHVSYGNMSSACVNDMRKKSKKNNTTGGDWGVGGGTNTVVHSVATGTN

SEQ ID NO: 328 - protein, 281 aa, Artificial Sequence
  PKS94
MASVNRNARAKGATVANGTATDNCYSDADYYRVTKSHMTKKKNRNCDKSMNKKRYSHTMHNNGAYMASNNRNNTAVKGKAAKAKWGKSKNTHVCTTSGVMGADYKANGSVRRVMYHGCYAGGTVRTAKDANNAGARVVVCSNTVVTRGSDADSVGAGDGSAAVNVGSDDNSNRVSAATNNSTGANAGNRVGTHWNVSTNSNNKCTADGNSDWNSWNAHGDANDAVAKNDKKKATRHVSYGNMSSACVNDMRKKSKGRATTGGDWGVGGGTNTVVHSNTVTN

SEQ ID NO: 329 - protein, 237 aa, Artificial Sequence
  PKS95
MASVNRNARAKGATNANGTATDHCVYSDYADYYRVTKSHMTKKKNRNCDKSMNKKRYNHTMHNNGAYMASNNRNNTAVKGKAAKAKWGKSKNTHVCTTSGVMGADYKANGTSVRRVMYHGCYAGGTVRTAKDANNAGARVVVCSNTVVTRGSDADSVGAGDGSAAVNVGSDDVSNRVSAATNNSAGANAGNRVGTHWNVTNSNNKCTADGNSDWNSWNAHGGANDAVAKNDKRNKDM

SEQ ID NO: 330 - protein, 265 aa, Artificial Sequence
  PKS96
MASNNRNARAKGATNANGTATDHCVYSDYADYYRVTKSHMTKKKNRNCDKSMNKKRYNHTMHNNGAYMASNNRNNTAVKGKAAKAKWGKSKNTHVCTTSGVMGADYKANGTSVRRVMYHGARVVVCSNTVVTRGSDADSVGAGDGSAAVNVGSDDVSNRVSAATNNSAGANAGNRVGTHWNVTNSNNKCNADGNSDWNSWNAHGGANDAVAKNKKKATRHVSYGNMSSACVNDMRKKSKGKATTGGDWGVGGGTNTVVHSVMVTN

SEQ ID NO: 331 - protein, 259 aa, Artificial Sequence
  PKS97
MASVRNARAKGATNANGTATDHCVYSDYADYYRVTKSHMTKKKNRNCDKSMNKKYNHTMHNNGAYMASNNRNNTAVKGKAAKAKWGKSKNTHVCTTSGVMGADYKANGTSVRRVMYHGCYAGGTVRTAKDANNAGARVVVCSNTVVTRGSADSVGAATNNSAGANAGNRVGTHWNVTNSNNKCTADGNSDWNSWNAHGGANDAVAKNKKKATRHVSYGNMSSACVNDMRKKSKGKATTGGDWGVGGGTNTVVHSNTVTN

SEQ ID NO: 332 - protein, 281 aa, Artificial Sequence
  PKS98
MASVRNARAKGATNTNGTATDHCNYSDYADYYRVTKSHMTKKKNRNCKSMNKKRYNHTMHNNGAYMASNNRNNTAVRGRDAAKAKWGKSKNTHVCTTSGVMGADYKANGTSVRRVMYHGCYAGGTVRAAKDANNTGARVVVCSNTVVTRGSDADSVGAGDGSSAVNVGSDDVSNRVSAATNNSAGANAGNRVGTHWNVTNSNNKCTADGNSDWNSWNAHGGANDTVAKNKKKATRHVSYGNMSSACVNDMRKKSKGNATTGGDWGVGGGTNTVVHSNTVTN

SEQ ID NO: 333 - protein, 263 aa, Artificial Sequence
  PKS99
MASVDNRNAHAKRATNVNGTATDNYAYSDYADYYRVTKSHMTDKKKNRNCKSMNKKRYNHTMHNMGAYMASNNRNNTTVKGKATKAKWGKSKNTHVCTTSGVMGADYKANGTSVRRVMYHGCYAGGTVRTAKDANNAGARVVVCSNTVVTRGSTHHSVGAGDGSTTNNVGSDDTSNRNSAATNNTGANVGNRVGTHWNVTNSNNKCTAAGNSDWNSWNAHGGANDAVAKNKKKATRHNSYGNMSSACVNDMRKKSKRTTTGKD

SEQ ID NO: 334 - protein, 287 aa, Artificial Sequence
  PKS100
MAAKVTVVRKARAGASVANGTVTNCVYADYADYYRVTKSHMTKKKRNCRKSMNKRYMHTDNNNMASYSASNARANVVKGAAAAKAKWGRSNTHNNCTTSGVDMGADSRNNKGDSVKRVMYHGCAGGMVRNAKDANNRGARVNVCSNTVVTRGSAHDSVGAGDGAAAVNVGADDHVRMVSASTNNSDGANGHRVGTHRVNSSNNRSKGNSDWNSNWVAHGGANNAVSKAGNDKARRATRVSYGNMSSACVNDMRKSADGRATTGGMDWGVGGGTVTVVHSVNTTGHAA

SEQ ID NO: 335 - protein, 295 aa, Artificial Sequence
  PKS101
MAGATVTVDVRKGRATGATVANGTATANCVYADYDYYRNTKSDHTDKKKRMCDKSMNRKRYMHTSNSMCAYMASDARDVVVTVKGKAAAKANKWGKSRNTHVCTTSGVDMGADYTKAGRSVNRMMYGCAGGTVRVAKDANNRGARVVVCSNTAVTRGSSHDSVGAGDGAAAVVVGADDGRVRVSAATNDSGANDGHRVGTHKDVGNSKNNRADAGNSDWNSNWVAHGGANDVARVGDKARMRATRHVSYGNMSSACVNDMRKRSADGATTGGDWGVGGGTVTVVHSVNTTGATAA

SEQ ID NO: 336 - protein, 281 aa, Artificial Sequence
  PKS102
MAGATVTVVRKARATGATVANGTATANCVYADYDYYRNTKSHTDKKKRMCDKSMNRKRYMHTANSMCAYMASDARDVVVVVKGKAAAKANKWGKSRNTHVCTTSGVDMGADYTKAGRSVNRMMYGCAGGTVRVAKDANNRGARVVVCSNTAVTRGSSHDSVGAGDGAAAVVVGADDDRVRVSAATNDSGANDGHRVGTHKDVGNSKNNGRADDAKGNSDWNSNWVAHGGANDVAKVGDKARMRATRHVSYGNMSSACVNDMRKRSADGATTGGDWGVVKVA

SEQ ID NO: 337 - protein, 288 aa, Artificial Sequence
  PKS103
MASNTVDNRKSRADTAANANGTANANVTANYDYYNVTKSHMTNKNKHNCNNTTNRKRYTHDYKNNMCYMASNARSMVTVKGKAAMKANKWGNKSKNTHNCTMSGNDMGADYHCAKTVKRVMYHGCHGGGTVRAKDANNKGARVAVCSDNMAMRGTKSHASMVGAGDGASAVNVGANSMGRNVSAATNNSDKANNGNVRMGTDRKDVHNSNNNKSMATNGNSDWNSWNTHGGTNNAVAKKKNSRYVSYGNMSSSCVNMDRKRSKGKSTTGDGWGVGGGTVTVHSVANKN

SEQ ID NO: 338 - protein, 277 aa, Artificial Sequence
  PKS104
MSTTGDSNKNNGMGTANRYNTAKHKNGANYKKTVYKNGVGRHGRDYTTKTSYVRANNVNNYNGAMDNSKSCKAVDWGGNKDNTHVTATCTGMVDNARNNGNDDNNRVSSNNGCCAGTTMRNAADNARANKNRVCTCTMSSADVNTSYGDGSAAYNMGSKSKYVGSHTKNNNTNKAVGWSMTNDMNTNSTNVGNKMKCNGNKTDVACYHGGGNKGNCKSGNTDYHARHSWHVKKYGNMSSATVTMNSARYDKVAKYSNSAGGAVGNVKNHNNNTNNKY

SEQ ID NO: 339 - protein, 291 aa, Artificial Sequence
  PKS105
MATNNNGNNGMGNSNDNYNTTKDTNSKYNVADDMVDKAKANNNNCNGRHSRDTHNDSSYRRHTNGVNKVYNVDAKTNSCKANWGGSKDTHVTATCTGMVDNNVNTGNDNHRVSSNNGCCAGYTTMRNATDARANKNHRVVCCTCSHVTSKDDNVNASGDGSAAYVMGSRNKVNGTHTAVNTHMTYANTSNGWDMHDGTVSKNSKNRKMVKCNNANTDVGCYNHGGGNNRGNCKSGNTHARHSWNNKKYGNMSSASVTMNSARYDTVAKYSNGNAMGGVVGVVKNHYMNNNN

SEQ ID NO: 340 - protein, 325 aa, Artificial Sequence
  PKS106
MVSVSNRNNRAGATVANGTANSNCVDSRTNKNRHMYTNKNNMCAYKASDARDMMNRVRVGKAATKANKWGMSKNTHNCTTSGVAGVDYNVGDCVKRYMMYHGCAGGTVRAKDANNKDARVNVCSNTAVTRGSTDMDSVGAADGAAANNNGSDVVKNNVSTDKVGSHGANGGRVGTYNKSVDNNSNNNDASKADGNSDYNSNWNAHGGRANDVKKVNKKMKATRDVSNYGNMSSACVNMDMRKSRGKTTGGDWGVGGGTNTSYKNSTMNNRGWGDKGMANVVMDDKNNSVVRVSGGMKRKSGNANGNNKVVCNSKTACNHNKKNGN

SEQ ID NO: 341 - protein, 278 aa, Artificial Sequence
  PKS107
MVSVSGTRNNRAGATVANGTANSNCVDSTYADYYRVTDSHMTDKKKRNCRTNKNRHMYTNKNNMCAYKASDARDMMNRVRVGKAATKANKWGMSKNTHNCTTSGVAGVDYNVGDCVKRYMMYHGCAGGTVRAKDANNKDARVNVCSNTAVTRGSTDMDSVGAADGAAANNNGSDVVKNNVSTDKVGSHGANGGRVGTYNKSVDNNSNNNDASKADGNSDYNSNWNAHGGRANDVKVNKKMKATRDVSNYGNMSSACVNMDMRKKSGKTTGGDWGVGGG

SEQ ID NO: 342 - protein, 295 aa, Artificial Sequence
  PKS108
MATRVSSNKMADARNGHVYSSSSGSGNGAGTSNVAKNTASNANGKANRNCSTYTDYRVTHCSHKTKNRMRNCDKSGNNTRYDAKHSYTGASNRHDAVKAAAAASAWGRACDVTHNVVTSGVANGADVRVKGRDVSRVMYMGCYAGVTARAKDANNGSRVNACSMTATTRASKSMYDNVGASGDGAVGVNVGAKRGNRSNNHWAGVSADTHVVGKKDGYDKSGVGKHNACRSDHANNGNVWAVHGGANNTVNSKRASRDVANYGNVSASSVYVDRHRGWGAAAGGNTGVRRNVNHR

SEQ ID NO: 343 - protein, 285 aa, Artificial Sequence
  PKS109
MASVNRNARAKGATNANGTATDHCVYSDYADYYRVTKSHMTAKKKNRNCDKSMNKKRYNHTMHNNVAYMASNNRNNTAKVKGKAAKAKWGKSKNTHVCTTSGVMGADYKANGSVRRVMYHGCYAGGTVRTAKDANNAGARVVVGSNTVVTRGSDADSVGAGDGSAANNVGSDDNSNRVSAATNNSAGANAGNVRVGTHWNVTNSDNKCTADGNSDWNSWNAHGGANDAVAKNDKKKATRHVSYGNMSSACVNDVRKKSKGRATTGGDWGVGGGTNTVVHSNMVTN

SEQ ID NO: 344 - DNA, 7948 bp, Artificial Sequence
  PLAS443
aagagtaaaaaattgtacttggcggataatgcctttagcggcttaactgtgccctccatggaaaaatcagtcaagatatccacatgtgtttttagtaaacaaattttgggacctaatgcttcaactaactccagtaattccttggtggtacgaacatccaatgaagcacacaagtttgtttgcttttcgtgcatgatattaaatagcttggcagcaacaggactaggatgagtagcagcacgttccttatatgtagctttcgacatgatttatcttcgtttcctgcaggtttttgttctgtgcagttgggttaagaatactgggcaatttcatgtttcttcaacactacatatgcgtatatataccaatctaagtctgtgctccttccttcgttcttccttctgttcggagattaccgaatcaaaaaaatttcaaagaaaccgaaatcaaaaaaaagaataaaaaaaaaatgatgaattgaattgaaaagctagcttatcgatgataagctgtcaaagatgagaattaattccacggactatagactatactagatactccgtctactgtacgatacacttccgctcaggtccttgtcctttaacgaggccttaccactcttttgttactctattgatccagctcagcaaaggcagtgtgatctaagattctatcttcgcgatgtagtaaaactagctagaccgagaaagagactagaaatgcaaaaggcacttctacaatggctgccatcattattatccgatgtgacgctgcagcttctcaatgatattcgaatacgctttgaggagatacagcctaatatccgacaaactgttttacagatttacgatcgtacttgttacccatcattgaattttgaacatccgaacctgggagttttccctgaaacagatagtatatttgaacctgtataataatatatagtctagcgctttacggaagacaatgtatgtatttcggttcctggagaaactattgcatctattgcataggtaatcttgcacgtcgcatccccggttcattttctgcgtttccatcttgcacttcaatagcatatctttgttaacgaagcatctgtgcttcattttgtagaacaaaaatgcaacgcgagagcgctaatttttcaaacaaagaatctgagctgcatttttacagaacagaaatgcaacgcgaaagcgctattttaccaacgaagaatctgtgcttcatttttgtaaaacaaaaatgcaacgcgacgagagcgctaatttttcaaacaaagaatctgagctgcatttttacagaacagaaatgcaacgcgagagcgctattttaccaacaaagaatctatacttcttttttgttctacaaaaatgcatcccgagagcgctatttttctaacaaagcatcttagattactttttttctcctttgtgcgctctataatgcagtctcttgataactttttgcactgtaggtccgttaaggttagaagaaggctactttggtgtctattttctcttccataaaaaaagcctgactccacttcccgcgtttactgattactagcgaagctgcgggtgcattttttcaagataaaggcatccccgattatattctataccgatgtggattgcgcatactttgtgaacagaaagtgatagcgttgatgattcttcattggtcagaaaattatgaacggtttcttctattttgtctctatatactacgtataggaaatgtttacattttcgtattgttttcgattcactctatgaatagttcttactacaatttttttgtctaaagagtaatactagagataaacataaaaaatgtagaggtcgagtttagatgcaagttcaaggagcgaaaggtggatgggtaggttatatagggatatagcacagagatatatagcaaagagatacttttgagcaatgtttgtggaagcggtattcgcaatgggaagctccaccccggttgataatcagaaaagccccaaaaacaggaagattgtataagcaaatatttaaattgtaaacgttaatattttgttaaaattcgcgttaaatttttgttaaatcagctcattttttaacgaatagcccgaaatcggcaaaatcccttataaatcaaaagaatagaccgagatagggttgagtgttgttccagtttccaacaagagtccactattaaagaacgtggactccaacgtcaaagggcgaaaaagggtctatcagggcgatggcccactacgtgaaccatcaccctaatcaagttttttggggtcgaggtgccgtaaagcagtaaatcggaagggtaaacggatgcccccatttagagcttgacggggaaagccggcgaacgtggcgagaaaggaagggaagaaagcgaaaggagcgggggctagggcggtgggaagtgtaggggtcacgctgggcgtaaccaccacacccgccgcgcttaatggggcgctacagggcgcgtggggatgatccactagtacggattagaagccgccgagcgggtgacagccctccgaaggaagactctcctccgtgcgtcctcgtcttcaccggtcgcgttcctgaaacgcagatgtgcctcgcgccgcactgctccgaacaataaagattctacaatactagcttttatggttatgaagaggaaaaattggcagtaacctggccccacaaaccttcaaatgaacgaatcaaattaacaaccataggatgataatgcgattagttttttagccttatttctggggtaattaatcagcgaagcgatgatttttgatctattaacagatatataaatgcaaaaactgcataaccactttaactaatactttcaacattttcggtttgtattacttcttattcaaatgtaataaaagtatcaacaaaaaattgttaatatacctctatactttaacgtcaaggagaaaaaaccccggatcggactactagcagctgtaatacgactcactatagggaatattaagcttaaacaatgtacaagtccttggatggtgttaccatctccgatattgaagttttgggtattgaatctggtgctgccaaaagattgcatggttctttgactgatattatcgctaattacggtgctgctactccagaaacttggagaaatattactgcccatgttttgtctccagagttgccattttcattccacagaatgttgtactacggttgctacaaagattttggtccagatccaccagcttggatgccagatccagaaactgctggtttgactaatgttggtcaattgctagaaagaaggggcaaagaattattgggttccagatacagagatccaatctcctcattttccgacttccaagaattctctgtttccaacccagaagtttactggaaaactgttttgttggacgaaatgaacgcttcttttgatactccaccacaatgcatcttgagggaaaatttgtctggtgatggtcatttgttggttccaggtggtcaatggttgccaggtgcttttggtaatccagctaaaaactgtttgatcgtcaacagaaagaggtccttgaacgatacaatggtcatttggagagatgaaggtaacgatgatttgccattgaacaagatgaccttgaaagaattgagaaccgaagtttggttggttgctcatgctttgaaggctttgggtttggaaaaaggttctgctattgctatcgatatgccaatgcatgttaacgccatcgttatctatttggctatagttttggctggttgcgttgttgtttctattgctgattcttttgccccaccagaaatttctactagattgaaaggttctgaagccaaggctattttcacccaagatttgattaagaggggtgagaagtctttgccactatactctaaaatcgttgctgctgaatctccaatggccatcgttattttgacaaagggttcttcatcttccaccaagttgagagatggtgatatttcttggcacgatttcttggaaaccgttaaggatttcaaggataacgaattcgctgctgttgaacaacctattgaagcctttactaatggtttgttctcttctggtactaccggtgatccaaaagctattccatggactttggctactccattcaaagctgctgctgatgcttggtgtcatatggatattagaatcggtgatgttgttgcttggccaactaatttgggttggatgatgggtccttggttggtttatgcttctttgttgaatggtgcttccattgccttgtataatggttctccattgggttctggtttcgctaagtttgttcaagatgctaaggttaccatgttgggtgttattccatctatcgttagatcttggaagtccaccaattctgtttctggttatgattggtctgccattagatgttttggttctactggtgaagcctccaatgttgaagaatatttgtggttgatgggtagagcacattacaagccaattattgaatactgcggtggtactgaaattggtggtggttttgttactggttctttgttgggtgctcaatctttggctgctttttctactccagctatgggttgttccttgtacattttgggtaatgatggtgttccaatcccacaaaatgaaccaggtgttggtgaattggctttggatccagttatgtttggtgcttcttctactttgttgaacgccaaccattacgatgtttactttaagggtatgccaatctggaacggtaaagttttgagaaggcatggtgatgttttcgaaagaacttctagaggttactaccatgctcatggtagagctgatgataccatgaatattggtggtatcaaggtttcctccgtcgaaattgaaagaatctgtaacgctgttgacaacaacgttttggaaactgctgctattggtgttccattggctggtggtggtccagaacaattggttattgctgttgttttcaagaactccgataacccaactgccgatttgaatcaattgaggatgtctttcaattccgccgtccaaaaaaagttgaaccctttgtttaaggtgtccaaggttgttccattgccatctttgccaagaactgctacaaacaaggttatgagaagaatcttgagaggtcaattcgcccaattggatctcgagcatgcatctagagggccgcatcatgtaattagttatgtcacgcttacattcacgccctccccccacatccgctctaaccgaaaaggaaggagttagacaacctgaagtctaggtccctatttatttttttatagttatgttagtattaagaacgttatttatatttcaaatttttcttttttttctgtacagacgcgtgtacgcatgtaacattatactgaaaaccttgcttgagaaggttttgggacgctcgaaggctttaatttgcggccctgcattaatgaatcggccaacgcgcggggagaggcggtttgcgtattgggcgctcttccgcttcctcgctcactgactcgctgcgctcggtcgttcggctgcggcgagcggtatcagctcactcaaaggcggtaatacggttatccacagaatcaggggataacgcaggaaagaacatgtgagcaaaaggccagcaaaagcccaggaaccgtaaaaaggccgcgttgctggcgtttttccataggctccgcccccctgacgagcatcacaaaaatcgacgctcaagtcagaggtggcgaaacccgacaggactataaagataccaggcgtttccccctggaagctccctcgtgcgctctcctgttccgaccctgccgcttaccggatacctgtccgcctttctcccttcgggaagcgtggcgctttctcatagctcacgctgtaggtatctcagttcggtgtaggtcgttcgctccaagctgggctgtgtgcacgaaccccccgttcagcccgaccgctgcgccttatccggtaactatcgtcttgagtccaacccggtaagacacgacttatcgccactggcagcagccactggtaacaggattagcagagcgaggtatgtaggcggtgctacagagttcttgaagtggtggcctaactacggctacactagaaggacagtatttggtatctgcgctctgctgaagccagttaccttcggaaaaagagttggtagctcttgatccggcaaacaaaccaccgctggtagcggtggtttttttgtttgcaagcagcagattacgcgcagaaaaaaaggatctcaagaagatcctttgatcttttctacggggtctgacgctcagtggaacgaaaactcacgttaagggattttggtcatgagattatcaaaaaggatcttcacctagatccttttaaattaaaaatgaagttttaaatcaatctaaagtatatatgagtaaacttggtctgacagttaccaatgcttaatcagtgaggcacctatctcagcgatctgtctatttcgttcatccatagttgcctgactccccgtcgtgtagataactacgatacgggagcgcttaccatctggccccagtgctgcaatgataccgcgagacccacgctcaccggctccagatttatcagcaataaaccagccagccggaagggccgagcgcagaagtggtcctgcaactttatccgcctccattcagtctattaattgttgccgggaagctagagtaagtagttcgccagttaatagtttgcgcaacgttgttggcattgctacaggcatcgtggtgtcactctcgtcgtttggtatggcttcattcagctccggttcccaacgatcaaggcgagttacatgatcccccatgttgtgcaaaaaagcggttagctccttcggtcctccgatcgttgtcagaagtaagttggccgcagtgttatcactcatggttatggcagcactgcataattctcttactgtcatgccatccgtaagatgcttttctgtgactggtgagtactcaaccaagtcattctgagaatagtgtatgcggcgaccgagttgctcttgcccggcgtcaatacgggataatagtgtatcacatagcagaactttaaaagtgctcatcattggaaaacgttcttcggggcgaaaactctcaaggatcttaccgctgttgagatccagttcgatgtaacccactcgtgcacccaactgatcttcagcatcttttactttcaccagcgtttctgggtgagcaaaaacaggaaggcaaaatgccgcaaaaaagggaataagggcgacacggaaatgttgaatactcatactcttcctttttcaatgggtaataactgatataattaaattgaagctctaatttgtgagtttagtatacatgcatttacttataatacagttttttagttttgctggccgcatcttctcaaatatgcttcccagcctgcttttctgtaacgttcaccctctaccttagcatcccttccctttgcaaatagtcctcttccaacaataataatgtcagatcctgtagagaccacatcatccacggttctatactgttgacccaatgcgtctcccttgtcatctaaacccacaccgggtgtcataatcaaccaatcgtaaccttcatctcttccacccatgtctctttgagcaataaagccgataacaaaatctttgtcgctcttcgcaatgtcaacagtacccttagtatattctccagtagatagggagcccttgcatgacaattctgctaacatcaaaaggcctctaggttcctttgttacttcttctgccgcctgcttcaaaccgctaacaatacctgggcccaccacaccgtgtgcattcgtaatgtctgcccattctgctattctgtatacacccgcagagtactgcaatttgactgtattaccaatgtcagcaaattttctgtcttcg

SEQ ID NO: 345 - DNA, 7948 bp, Artificial Sequence
  PLAS444
aagagtaaaaaattgtacttggcggataatgcctttagcggcttaactgtgccctccatggaaaaatcagtcaagatatccacatgtgtttttagtaaacaaattttgggacctaatgcttcaactaactccagtaattccttggtggtacgaacatccaatgaagcacacaagtttgtttgcttttcgtgcatgatattaaatagcttggcagcaacaggactaggatgagtagcagcacgttccttatatgtagctttcgacatgatttatcttcgtttcctgcaggtttttgttctgtgcagttgggttaagaatactgggcaatttcatgtttcttcaacactacatatgcgtatatataccaatctaagtctgtgctccttccttcgttcttccttctgttcggagattaccgaatcaaaaaaatttcaaagaaaccgaaatcaaaaaaaagaataaaaaaaaaatgatgaattgaattgaaaagctagcttatcgatgataagctgtcaaagatgagaattaattccacggactatagactatactagatactccgtctactgtacgatacacttccgctcaggtccttgtcctttaacgaggccttaccactcttttgttactctattgatccagctcagcaaaggcagtgtgatctaagattctatcttcgcgatgtagtaaaactagctagaccgagaaagagactagaaatgcaaaaggcacttctacaatggctgccatcattattatccgatgtgacgctgcagcttctcaatgatattcgaatacgctttgaggagatacagcctaatatccgacaaactgttttacagatttacgatcgtacttgttacccatcattgaattttgaacatccgaacctgggagttttccctgaaacagatagtatatttgaacctgtataataatatatagtctagcgctttacggaagacaatgtatgtatttcggttcctggagaaactattgcatctattgcataggtaatcttgcacgtcgcatccccggttcattttctgcgtttccatcttgcacttcaatagcatatctttgttaacgaagcatctgtgcttcattttgtagaacaaaaatgcaacgcgagagcgctaatttttcaaacaaagaatctgagctgcatttttacagaacagaaatgcaacgcgaaagcgctattttaccaacgaagaatctgtgcttcatttttgtaaaacaaaaatgcaacgcgacgagagcgctaatttttcaaacaaagaatctgagctgcatttttacagaacagaaatgcaacgcgagagcgctattttaccaacaaagaatctatacttcttttttgttctacaaaaatgcatcccgagagcgctatttttctaacaaagcatcttagattactttttttctcctttgtgcgctctataatgcagtctcttgataactttttgcactgtaggtccgttaaggttagaagaaggctactttggtgtctattttctcttccataaaaaaagcctgactccacttcccgcgtttactgattactagcgaagctgcgggtgcattttttcaagataaaggcatccccgattatattctataccgatgtggattgcgcatactttgtgaacagaaagtgatagcgttgatgattcttcattggtcagaaaattatgaacggtttcttctattttgtctctatatactacgtataggaaatgtttacattttcgtattgttttcgattcactctatgaatagttcttactacaatttttttgtctaaagagtaatactagagataaacataaaaaatgtagaggtcgagtttagatgcaagttcaaggagcgaaaggtggatgggtaggttatatagggatatagcacagagatatatagcaaagagatacttttgagcaatgtttgtggaagcggtattcgcaatgggaagctccaccccggttgataatcagaaaagccccaaaaacaggaagattgtataagcaaatatttaaattgtaaacgttaatattttgttaaaattcgcgttaaatttttgttaaatcagctcattttttaacgaatagcccgaaatcggcaaaatcccttataaatcaaaagaatagaccgagatagggttgagtgttgttccagtttccaacaagagtccactattaaagaacgtggactccaacgtcaaagggcgaaaaagggtctatcagggcgatggcccactacgtgaaccatcaccctaatcaagttttttggggtcgaggtgccgtaaagcagtaaatcggaagggtaaacggatgcccccatttagagcttgacggggaaagccggcgaacgtggcgagaaaggaagggaagaaagcgaaaggagcgggggctagggcggtgggaagtgtaggggtcacgctgggcgtaaccaccacacccgccgcgcttaatggggcgctacagggcgcgtggggatgatccactagtacggattagaagccgccgagcgggtgacagccctccgaaggaagactctcctccgtgcgtcctcgtcttcaccggtcgcgttcctgaaacgcagatgtgcctcgcgccgcactgctccgaacaataaagattctacaatactagcttttatggttatgaagaggaaaaattggcagtaacctggccccacaaaccttcaaatgaacgaatcaaattaacaaccataggatgataatgcgattagttttttagccttatttctggggtaattaatcagcgaagcgatgatttttgatctattaacagatatataaatgcaaaaactgcataaccactttaactaatactttcaacattttcggtttgtattacttcttattcaaatgtaataaaagtatcaacaaaaaattgttaatatacctctatactttaacgtcaaggagaaaaaaccccggatcggactactagcagctgtaatacgactcactatagggaatattaagcttaaacaatgaactacaaggccttggattgcattacctcttatgatattgaagccttgggcatcccatctaaattggctgaacaattgcacgaaaagttggccgaaatcgttaatactcatggtgctgctactccagctacttggcaaaacattactacccatattttgtccccagacttgccattttcattccatcagttgttgtactacggttgctacaaagattttggtccagatccaccagcttggattccagatccagaagctgctaaagttactaatgtcggtaagttgttggaaaccagaggtgaagaatttttgggttctggttacaaggatccaatctcctcattttccaacttccaagaattctccgtttccaacccagaagtttactggaaaactgtcttgaacgaaatgtccacctctttttctgttccaccacaatgcattttgagggaaaatccaaatggtgagaaccacttgtctaatccaggtggtcaatggttgccaggtgcttttgttaatccagctaaaaactgcttgtccgtcaactctaaaagatccttggatgatatcgtcattagatggtgtgatgaaggtgatggtggtttgccagttaagtctatgactttgaaagaattgagagccgaagtttggttggttgcttatgctttgaatgctttgggtttggataagggttctgctattgctattgatatgccaatgaacgttaactccgttgttatctacttggctatagttttggctggttacatcgttgtttccattgctgattctttcgcctccttggaaatttctgctagattgagaatttccaaggccaaggctattttcacccaagatttgattatcaggggtgacaagtccatcccattatactctagagttattgatgctcaagctccattggctatcgttattccagctaaaggttctagcttctccatgaagttgagagatggtgatatttcctggttggacttcttggaaagagtcagaaagttgaaagaaaacgaattcgctgctgttgaacaaccagttgaagcctttaccaatatcttgttctcttctggtactaccggtgaacctaaagctattccatggactaatgctactccattcaaagctgctgctgatgcttggtgtcatatggatattagaaaggctgatatagttgcctggccaactaatttgggttggatgatgggtccttggttggtttatgcttctttgttgaatggtgcttctgttgccttgtataatggttctccattaggttctggtttcgccaagtttgttcaagatgcaaaggttactatgttgggtgttgttccatctatcgttagaacttggaaatccaccaactgcattgatggttatgattggtcctctattagatgctttggttctactggtgaagcctctaatgttgatgaatacttgtggttgatgggtagagccttgtacaaaccagttattgaatattgcggtggcactgaaattggtggtggttttattactggttccttgttgcaagctcaatctttggctgctttttctacaccagctatgggttgtaagttgttcattttgggtaatgatggttgcccaatcccacaaaatgttccaggtatgggtgaattggctttgtctcctttgatttttggtgcttcttctaccttgttgaacgccaatcattacgatgtttacttctctggtatgccatcttggaacggtcaaattttgagaaggcatggtgatgttttcgaaagaacttctggtggttattacagagcacatggtagagctgatgataccatgaatttgggtggtatcaaggtttcctccgttgaaattgaaagaatctgcaacgctgttgactccaacgttttggaaactgctgctattggtgttccaccaccagatggtggtccagaacatttgactatagttgttgttttcaaggactccaactacagaccaccagatttgaatcaattgagaatgtccttcaactccgccgttcaaaaaaagttgaatcctttgttcaaggtgtcccacgttgttccattgccatctttgccaagaactgctacaaacaaggttatgagaagagtcttgagaaagcaattggcccaattggatctcgagcatgcatctagagggccgcatcatgtaattagttatgtcacgcttacattcacgccctccccccacatccgctctaaccgaaaaggaaggagttagacaacctgaagtctaggtccctatttatttttttatagttatgttagtattaagaacgttatttatatttcaaatttttcttttttttctgtacagacgcgtgtacgcatgtaacattatactgaaaaccttgcttgagaaggttttgggacgctcgaaggctttaatttgcggccctgcattaatgaatcggccaacgcgcggggagaggcggtttgcgtattgggcgctcttccgcttcctcgctcactgactcgctgcgctcggtcgttcggctgcggcgagcggtatcagctcactcaaaggcggtaatacggttatccacagaatcaggggataacgcaggaaagaacatgtgagcaaaaggccagcaaaagcccaggaaccgtaaaaaggccgcgttgctggcgtttttccataggctccgcccccctgacgagcatcacaaaaatcgacgctcaagtcagaggtggcgaaacccgacaggactataaagataccaggcgtttccccctggaagctccctcgtgcgctctcctgttccgaccctgccgcttaccggatacctgtccgcctttctcccttcgggaagcgtggcgctttctcatagctcacgctgtaggtatctcagttcggtgtaggtcgttcgctccaagctgggctgtgtgcacgaaccccccgttcagcccgaccgctgcgccttatccggtaactatcgtcttgagtccaacccggtaagacacgacttatcgccactggcagcagccactggtaacaggattagcagagcgaggtatgtaggcggtgctacagagttcttgaagtggtggcctaactacggctacactagaaggacagtatttggtatctgcgctctgctgaagccagttaccttcggaaaaagagttggtagctcttgatccggcaaacaaaccaccgctggtagcggtggtttttttgtttgcaagcagcagattacgcgcagaaaaaaaggatctcaagaagatcctttgatcttttctacggggtctgacgctcagtggaacgaaaactcacgttaagggattttggtcatgagattatcaaaaaggatcttcacctagatccttttaaattaaaaatgaagttttaaatcaatctaaagtatatatgagtaaacttggtctgacagttaccaatgcttaatcagtgaggcacctatctcagcgatctgtctatttcgttcatccatagttgcctgactccccgtcgtgtagataactacgatacgggagcgcttaccatctggccccagtgctgcaatgataccgcgagacccacgctcaccggctccagatttatcagcaataaaccagccagccggaagggccgagcgcagaagtggtcctgcaactttatccgcctccattcagtctattaattgttgccgggaagctagagtaagtagttcgccagttaatagtttgcgcaacgttgttggcattgctacaggcatcgtggtgtcactctcgtcgtttggtatggcttcattcagctccggttcccaacgatcaaggcgagttacatgatcccccatgttgtgcaaaaaagcggttagctccttcggtcctccgatcgttgtcagaagtaagttggccgcagtgttatcactcatggttatggcagcactgcataattctcttactgtcatgccatccgtaagatgcttttctgtgactggtgagtactcaaccaagtcattctgagaatagtgtatgcggcgaccgagttgctcttgcccggcgtcaatacgggataatagtgtatcacatagcagaactttaaaagtgctcatcattggaaaacgttcttcggggcgaaaactctcaaggatcttaccgctgttgagatccagttcgatgtaacccactcgtgcacccaactgatcttcagcatcttttactttcaccagcgtttctgggtgagcaaaaacaggaaggcaaaatgccgcaaaaaagggaataagggcgacacggaaatgttgaatactcatactcttcctttttcaatgggtaataactgatataattaaattgaagctctaatttgtgagtttagtatacatgcatttacttataatacagttttttagttttgctggccgcatcttctcaaatatgcttcccagcctgcttttctgtaacgttcaccctctaccttagcatcccttccctttgcaaatagtcctcttccaacaataataatgtcagatcctgtagagaccacatcatccacggttctatactgttgacccaatgcgtctcccttgtcatctaaacccacaccgggtgtcataatcaaccaatcgtaaccttcatctcttccacccatgtctctttgagcaataaagccgataacaaaatctttgtcgctcttcgcaatgtcaacagtacccttagtatattctccagtagatagggagcccttgcatgacaattctgctaacatcaaaaggcctctaggttcctttgttacttcttctgccgcctgcttcaaaccgctaacaatacctgggcccaccacaccgtgtgcattcgtaatgtctgcccattctgctattctgtatacacccgcagagtactgcaatttgactgtattaccaatgtcagcaaattttctgtcttcg

SEQ ID NO: 346 - DNA, 7396 bp, Artificial Sequence
  PLAS445
aagagtaaaaaattgtacttggcggataatgcctttagcggcttaactgtgccctccatggaaaaatcagtcaagatatccacatgtgtttttagtaaacaaattttgggacctaatgcttcaactaactccagtaattccttggtggtacgaacatccaatgaagcacacaagtttgtttgcttttcgtgcatgatattaaatagcttggcagcaacaggactaggatgagtagcagcacgttccttatatgtagctttcgacatgatttatcttcgtttcctgcaggtttttgttctgtgcagttgggttaagaatactgggcaatttcatgtttcttcaacactacatatgcgtatatataccaatctaagtctgtgctccttccttcgttcttccttctgttcggagattaccgaatcaaaaaaatttcaaagaaaccgaaatcaaaaaaaagaataaaaaaaaaatgatgaattgaattgaaaagctagcttatcgatgataagctgtcaaagatgagaattaattccacggactatagactatactagatactccgtctactgtacgatacacttccgctcaggtccttgtcctttaacgaggccttaccactcttttgttactctattgatccagctcagcaaaggcagtgtgatctaagattctatcttcgcgatgtagtaaaactagctagaccgagaaagagactagaaatgcaaaaggcacttctacaatggctgccatcattattatccgatgtgacgctgcagcttctcaatgatattcgaatacgctttgaggagatacagcctaatatccgacaaactgttttacagatttacgatcgtacttgttacccatcattgaattttgaacatccgaacctgggagttttccctgaaacagatagtatatttgaacctgtataataatatatagtctagcgctttacggaagacaatgtatgtatttcggttcctggagaaactattgcatctattgcataggtaatcttgcacgtcgcatccccggttcattttctgcgtttccatcttgcacttcaatagcatatctttgttaacgaagcatctgtgcttcattttgtagaacaaaaatgcaacgcgagagcgctaatttttcaaacaaagaatctgagctgcatttttacagaacagaaatgcaacgcgaaagcgctattttaccaacgaagaatctgtgcttcatttttgtaaaacaaaaatgcaacgcgacgagagcgctaatttttcaaacaaagaatctgagctgcatttttacagaacagaaatgcaacgcgagagcgctattttaccaacaaagaatctatacttcttttttgttctacaaaaatgcatcccgagagcgctatttttctaacaaagcatcttagattactttttttctcctttgtgcgctctataatgcagtctcttgataactttttgcactgtaggtccgttaaggttagaagaaggctactttggtgtctattttctcttccataaaaaaagcctgactccacttcccgcgtttactgattactagcgaagctgcgggtgcattttttcaagataaaggcatccccgattatattctataccgatgtggattgcgcatactttgtgaacagaaagtgatagcgttgatgattcttcattggtcagaaaattatgaacggtttcttctattttgtctctatatactacgtataggaaatgtttacattttcgtattgttttcgattcactctatgaatagttcttactacaatttttttgtctaaagagtaatactagagataaacataaaaaatgtagaggtcgagtttagatgcaagttcaaggagcgaaaggtggatgggtaggttatatagggatatagcacagagatatatagcaaagagatacttttgagcaatgtttgtggaagcggtattcgcaatgggaagctccaccccggttgataatcagaaaagccccaaaaacaggaagattgtataagcaaatatttaaattgtaaacgttaatattttgttaaaattcgcgttaaatttttgttaaatcagctcattttttaacgaatagcccgaaatcggcaaaatcccttataaatcaaaagaatagaccgagatagggttgagtgttgttccagtttccaacaagagtccactattaaagaacgtggactccaacgtcaaagggcgaaaaagggtctatcagggcgatggcccactacgtgaaccatcaccctaatcaagttttttggggtcgaggtgccgtaaagcagtaaatcggaagggtaaacggatgcccccatttagagcttgacggggaaagccggcgaacgtggcgagaaaggaagggaagaaagcgaaaggagcgggggctagggcggtgggaagtgtaggggtcacgctgggcgtaaccaccacacccgccgcgcttaatggggcgctacagggcgcgtggggatgatccactagtacggattagaagccgccgagcgggtgacagccctccgaaggaagactctcctccgtgcgtcctcgtcttcaccggtcgcgttcctgaaacgcagatgtgcctcgcgccgcactgctccgaacaataaagattctacaatactagcttttatggttatgaagaggaaaaattggcagtaacctggccccacaaaccttcaaatgaacgaatcaaattaacaaccataggatgataatgcgattagttttttagccttatttctggggtaattaatcagcgaagcgatgatttttgatctattaacagatatataaatgcaaaaactgcataaccactttaactaatactttcaacattttcggtttgtattacttcttattcaaatgtaataaaagtatcaacaaaaaattgttaatatacctctatactttaacgtcaaggagaaaaaaccccggatcggactactagcagctgtaatacgactcactatagggaatattaagcttaaacaatggaaaagtctggttatggtagggatggtatctttagatctttaagaccaccattggttttgccaaaggatccaaatttgtctgccgtttcattcttgttcagaaactcttcttcctacccaaacaaaccagctttgattgatgctgattccggtgaaattttgtccttctcccaattgaaatctaccgttgctaaagtttcccatggtttcttgcatttgggcattaagaagaacgacgttgttttgattttcgccccaaactctattcatttcccagtttgtttcttgggcattattgctattggtgctattgctactacttccaacccattatacaccgtgtctgaattgtctaagcaagtcaaggattctaacccaaagttgattatcaccgttccagaattgtgggaaaaggttaagggttttaacttgccaaccgttatgttgtctgctgaacataagtctgttccaaaaaaggtcttgaccttcaacggtttggttaacttgtctggttctgcttctgatttcccatctgttaatgttaagagatccgataccgctgtcttgttgtattcttctggtactactggtacttccaagggtgttgttttgactcatggtaactttattgctgcctctttgatggttgctatggatcaagaaattgccaaagaaatgcacaacgttttcttgtgcgttttgccaatgtttcacgtttttggtttggccgttattacctactctcaattgcaaagaggtaacgccgttgtttctatggctaaattcgatttggagaagatcttgatgaccgtcgaaagatacaagattacccatttttgggttgttccaccaatcgttttggctttggctaaaaactctgttgtcaagaagtacaacttgtcctccttgaaacatattggttctggtgctgctccattgggtaaagaattgatggaagaatgcgccaagattatcccacaaggtgttgttattcaaggttacggtatgactgaaacctgtggtatagtttctgttgaagataccagaggtggtaagagaaatactggttctgctggtactttggtttctggtgttgaagctcaaatagttggtgttgatactttgaaaccattgccaccaaatcagttgggtgaaatttgggttagaggtccaaatatgatgcagggttatttgaacaatccacaagctactaagtccaccatggataagaaaggttgggttcatactggtgatttgggttactttgatgaagatggtcacttgttcgttgtcgacagaatcaaagaattgatcaagtacaagggtttccaagttgctccagctgaattggaaggtttgttggtttctcatccagaaatcttggatgccgttgttattccatttccagatgctgaagctggtgaagttccagttgcttatgttgttagatctccaaactctagcttgaccgaagaagatgtccaaaagttcattgctaatcaagttgccccattcaagagattgagaaaggttaccttcatcaactccgttccaaaatctgcttctggtaagatcttgagaagggaattgattgaaaagagggcctctctcgagcatgcatctagagggccgcatcatgtaattagttatgtcacgcttacattcacgccctccccccacatccgctctaaccgaaaaggaaggagttagacaacctgaagtctaggtccctatttatttttttatagttatgttagtattaagaacgttatttatatttcaaatttttcttttttttctgtacagacgcgtgtacgcatgtaacattatactgaaaaccttgcttgagaaggttttgggacgctcgaaggctttaatttgcggccctgcattaatgaatcggccaacgcgcggggagaggcggtttgcgtattgggcgctcttccgcttcctcgctcactgactcgctgcgctcggtcgttcggctgcggcgagcggtatcagctcactcaaaggcggtaatacggttatccacagaatcaggggataacgcaggaaagaacatgtgagcaaaaggccagcaaaagcccaggaaccgtaaaaaggccgcgttgctggcgtttttccataggctccgcccccctgacgagcatcacaaaaatcgacgctcaagtcagaggtggcgaaacccgacaggactataaagataccaggcgtttccccctggaagctccctcgtgcgctctcctgttccgaccctgccgcttaccggatacctgtccgcctttctcccttcgggaagcgtggcgctttctcatagctcacgctgtaggtatctcagttcggtgtaggtcgttcgctccaagctgggctgtgtgcacgaaccccccgttcagcccgaccgctgcgccttatccggtaactatcgtcttgagtccaacccggtaagacacgacttatcgccactggcagcagccactggtaacaggattagcagagcgaggtatgtaggcggtgctacagagttcttgaagtggtggcctaactacggctacactagaaggacagtatttggtatctgcgctctgctgaagccagttaccttcggaaaaagagttggtagctcttgatccggcaaacaaaccaccgctggtagcggtggtttttttgtttgcaagcagcagattacgcgcagaaaaaaaggatctcaagaagatcctttgatcttttctacggggtctgacgctcagtggaacgaaaactcacgttaagggattttggtcatgagattatcaaaaaggatcttcacctagatccttttaaattaaaaatgaagttttaaatcaatctaaagtatatatgagtaaacttggtctgacagttaccaatgcttaatcagtgaggcacctatctcagcgatctgtctatttcgttcatccatagttgcctgactccccgtcgtgtagataactacgatacgggagcgcttaccatctggccccagtgctgcaatgataccgcgagacccacgctcaccggctccagatttatcagcaataaaccagccagccggaagggccgagcgcagaagtggtcctgcaactttatccgcctccattcagtctattaattgttgccgggaagctagagtaagtagttcgccagttaatagtttgcgcaacgttgttggcattgctacaggcatcgtggtgtcactctcgtcgtttggtatggcttcattcagctccggttcccaacgatcaaggcgagttacatgatcccccatgttgtgcaaaaaagcggttagctccttcggtcctccgatcgttgtcagaagtaagttggccgcagtgttatcactcatggttatggcagcactgcataattctcttactgtcatgccatccgtaagatgcttttctgtgactggtgagtactcaaccaagtcattctgagaatagtgtatgcggcgaccgagttgctcttgcccggcgtcaatacgggataatagtgtatcacatagcagaactttaaaagtgctcatcattggaaaacgttcttcggggcgaaaactctcaaggatcttaccgctgttgagatccagttcgatgtaacccactcgtgcacccaactgatcttcagcatcttttactttcaccagcgtttctgggtgagcaaaaacaggaaggcaaaatgccgcaaaaaagggaataagggcgacacggaaatgttgaatactcatactcttcctttttcaatgggtaataactgatataattaaattgaagctctaatttgtgagtttagtatacatgcatttacttataatacagttttttagttttgctggccgcatcttctcaaatatgcttcccagcctgcttttctgtaacgttcaccctctaccttagcatcccttccctttgcaaatagtcctcttccaacaataataatgtcagatcctgtagagaccacatcatccacggttctatactgttgacccaatgcgtctcccttgtcatctaaacccacaccgggtgtcataatcaaccaatcgtaaccttcatctcttccacccatgtctctttgagcaataaagccgataacaaaatctttgtcgctcttcgcaatgtcaacagtacccttagtatattctccagtagatagggagcccttgcatgacaattctgctaacatcaaaaggcctctaggttcctttgttacttcttctgccgcctgcttcaaaccgctaacaatacctgggcccaccacaccgtgtgcattcgtaatgtctgcccattctgctattctgtatacacccgcagagtactgcaatttgactgtattaccaatgtcagcaaattttctgtcttcg

SEQ ID NO: 347 - DNA, 7945 bp, Artificial Sequence
  PLAS446
aagagtaaaaaattgtacttggcggataatgcctttagcggcttaactgtgccctccatggaaaaatcagtcaagatatccacatgtgtttttagtaaacaaattttgggacctaatgcttcaactaactccagtaattccttggtggtacgaacatccaatgaagcacacaagtttgtttgcttttcgtgcatgatattaaatagcttggcagcaacaggactaggatgagtagcagcacgttccttatatgtagctttcgacatgatttatcttcgtttcctgcaggtttttgttctgtgcagttgggttaagaatactgggcaatttcatgtttcttcaacactacatatgcgtatatataccaatctaagtctgtgctccttccttcgttcttccttctgttcggagattaccgaatcaaaaaaatttcaaagaaaccgaaatcaaaaaaaagaataaaaaaaaaatgatgaattgaattgaaaagctagcttatcgatgataagctgtcaaagatgagaattaattccacggactatagactatactagatactccgtctactgtacgatacacttccgctcaggtccttgtcctttaacgaggccttaccactcttttgttactctattgatccagctcagcaaaggcagtgtgatctaagattctatcttcgcgatgtagtaaaactagctagaccgagaaagagactagaaatgcaaaaggcacttctacaatggctgccatcattattatccgatgtgacgctgcagcttctcaatgatattcgaatacgctttgaggagatacagcctaatatccgacaaactgttttacagatttacgatcgtacttgttacccatcattgaattttgaacatccgaacctgggagttttccctgaaacagatagtatatttgaacctgtataataatatatagtctagcgctttacggaagacaatgtatgtatttcggttcctggagaaactattgcatctattgcataggtaatcttgcacgtcgcatccccggttcattttctgcgtttccatcttgcacttcaatagcatatctttgttaacgaagcatctgtgcttcattttgtagaacaaaaatgcaacgcgagagcgctaatttttcaaacaaagaatctgagctgcatttttacagaacagaaatgcaacgcgaaagcgctattttaccaacgaagaatctgtgcttcatttttgtaaaacaaaaatgcaacgcgacgagagcgctaatttttcaaacaaagaatctgagctgcatttttacagaacagaaatgcaacgcgagagcgctattttaccaacaaagaatctatacttcttttttgttctacaaaaatgcatcccgagagcgctatttttctaacaaagcatcttagattactttttttctcctttgtgcgctctataatgcagtctcttgataactttttgcactgtaggtccgttaaggttagaagaaggctactttggtgtctattttctcttccataaaaaaagcctgactccacttcccgcgtttactgattactagcgaagctgcgggtgcattttttcaagataaaggcatccccgattatattctataccgatgtggattgcgcatactttgtgaacagaaagtgatagcgttgatgattcttcattggtcagaaaattatgaacggtttcttctattttgtctctatatactacgtataggaaatgtttacattttcgtattgttttcgattcactctatgaatagttcttactacaatttttttgtctaaagagtaatactagagataaacataaaaaatgtagaggtcgagtttagatgcaagttcaaggagcgaaaggtggatgggtaggttatatagggatatagcacagagatatatagcaaagagatacttttgagcaatgtttgtggaagcggtattcgcaatgggaagctccaccccggttgataatcagaaaagccccaaaaacaggaagattgtataagcaaatatttaaattgtaaacgttaatattttgttaaaattcgcgttaaatttttgttaaatcagctcattttttaacgaatagcccgaaatcggcaaaatcccttataaatcaaaagaatagaccgagatagggttgagtgttgttccagtttccaacaagagtccactattaaagaacgtggactccaacgtcaaagggcgaaaaagggtctatcagggcgatggcccactacgtgaaccatcaccctaatcaagttttttggggtcgaggtgccgtaaagcagtaaatcggaagggtaaacggatgcccccatttagagcttgacggggaaagccggcgaacgtggcgagaaaggaagggaagaaagcgaaaggagcgggggctagggcggtgggaagtgtaggggtcacgctgggcgtaaccaccacacccgccgcgcttaatggggcgctacagggcgcgtggggatgatccactagtacggattagaagccgccgagcgggtgacagccctccgaaggaagactctcctccgtgcgtcctcgtcttcaccggtcgcgttcctgaaacgcagatgtgcctcgcgccgcactgctccgaacaataaagattctacaatactagcttttatggttatgaagaggaaaaattggcagtaacctggccccacaaaccttcaaatgaacgaatcaaattaacaaccataggatgataatgcgattagttttttagccttatttctggggtaattaatcagcgaagcgatgatttttgatctattaacagatatataaatgcaaaaactgcataaccactttaactaatactttcaacattttcggtttgtattacttcttattcaaatgtaataaaagtatcaacaaaaaattgttaatatacctctatactttaacgtcaaggagaaaaaaccccggatcggactactagcagctgtaatacgactcactatagggaatattaagcttaaacaatgtacaagtccttggattccgttaccgttaatgatattgaagcctccggtatctcttcacaattggctgaagaaatctacagaaaggttaccgaaatcgttgatggttatggtgctgctactccagaatcttggaacagaatttccaaacatgttttgaccccaaacttgccattctccttgcatcaaatgatgtactacggttgctacaaggattttggtccagatccaccagcttggatgccagatccagaatctgctttgttgactaatgttggtttgttgttggagaagcacggtaaagaatttttgggctctaagtacaaggacccaatctcttcattttcccacttgcaagaattctccgtttctaacccagaagtttactggaaaactgtcttggacgaaatgtgcgttaatttctctgttccaccagattgcatcttgcatgaatctacatctgaagagtccaggattttgaatccaggtggtaaatggttgccaggtgcttttgttaatccagctaaaaactgcttgatcgtcaattctaaaagaggcttggacgatatcgttatcaggtggagagatgaaggtgatgatgatttgccagttaagtccatgaccttgaaagaattgcaattggaagtttggttggttgctcatgctttgaatgctttgggtttggaaagaggttctgctattgctattgatatgccaatgaacgtctactccgttattatctacttggctatagttttggccggttacatcgttgtttctattgctgattctttcgccccattggaaatttctaccagattgaagatttccgaagccaaggctattttcacccaagatttgattatcaggggtgagaagtccatcccattatactctagagttgttgaagctgaagctccaatggctatagttattccagctagaggtttttcttgctccgctaaattgagagatggtgatatttcttggtccgacttcttggaaagagtcagaaaattgaagggtgatgttttcgaagctgttgaacaaccagttgaagccttcactaatgtcttgttttcttctggtactaccggtgaacctaaagctattccatggactcatgttactccattgaaagctgctgctgatgcttggtgtcatatggatattcattctggtgatatagttgcctggccaactaatttgggttggatgatgggtccttggttggtttatgcttctttgttgaatggtgcttctatggccttgtataacggttctccattgtcatctggtttggctaagtttgttcaagatgctaaggttaccatgttgggtgttattccatctatagttagagcttggaagtctaccaattgtgttgctggttatgattggtcctctatcagatgtttttcatctactggtgaagcctccaacgttgatgaatatttgtggttgatgggtagagcttgctacaagccaattattgaatattgcggtggtactgaaattggtggtggttttgtttctggttctttcttgcaaccacaatctttggctgctttttctactccagctatgggttgtaggttgttcattttgggtgatgatggtcatttgattccacaagatgctccaggtatgggtgaattggctttgggtcctttgatgtttggttcttcttctactttgttgaacgcctcccattacgatgtctactttaaagaaatgccatcctggaacggtttgatcttgagaaggcatggtgatgtttttgaaagaacctcaagaggttactaccatgctcatggtagagctgatgataccatgaatattggtggtatcaaggtttcctccgtcgaaattgaaagaatctgtaacgctgttgactcctctgttttggaaactgctgctattggtgttccaccagctgatggtggtccagaaagattggttattgctgttgttttcaaggatccagataacgctactccagatttgaatcagtggagaaagtctttcaattccgccgttcaaaagaacttgaaccctttgtttagagtttcccatgttgttgctttgtctgctttgccaagaactgcttctaacaaggttatgagaagagtcttgagaaagcaattggcccaagttgatctcgagcatgcatctagagggccgcatcatgtaattagttatgtcacgcttacattcacgccctccccccacatccgctctaaccgaaaaggaaggagttagacaacctgaagtctaggtccctatttatttttttatagttatgttagtattaagaacgttatttatatttcaaatttttcttttttttctgtacagacgcgtgtacgcatgtaacattatactgaaaaccttgcttgagaaggttttgggacgctcgaaggctttaatttgcggccctgcattaatgaatcggccaacgcgcggggagaggcggtttgcgtattgggcgctcttccgcttcctcgctcactgactcgctgcgctcggtcgttcggctgcggcgagcggtatcagctcactcaaaggcggtaatacggttatccacagaatcaggggataacgcaggaaagaacatgtgagcaaaaggccagcaaaagcccaggaaccgtaaaaaggccgcgttgctggcgtttttccataggctccgcccccctgacgagcatcacaaaaatcgacgctcaagtcagaggtggcgaaacccgacaggactataaagataccaggcgtttccccctggaagctccctcgtgcgctctcctgttccgaccctgccgcttaccggatacctgtccgcctttctcccttcgggaagcgtggcgctttctcatagctcacgctgtaggtatctcagttcggtgtaggtcgttcgctccaagctgggctgtgtgcacgaaccccccgttcagcccgaccgctgcgccttatccggtaactatcgtcttgagtccaacccggtaagacacgacttatcgccactggcagcagccactggtaacaggattagcagagcgaggtatgtaggcggtgctacagagttcttgaagtggtggcctaactacggctacactagaaggacagtatttggtatctgcgctctgctgaagccagttaccttcggaaaaagagttggtagctcttgatccggcaaacaaaccaccgctggtagcggtggtttttttgtttgcaagcagcagattacgcgcagaaaaaaaggatctcaagaagatcctttgatcttttctacggggtctgacgctcagtggaacgaaaactcacgttaagggattttggtcatgagattatcaaaaaggatcttcacctagatccttttaaattaaaaatgaagttttaaatcaatctaaagtatatatgagtaaacttggtctgacagttaccaatgcttaatcagtgaggcacctatctcagcgatctgtctatttcgttcatccatagttgcctgactccccgtcgtgtagataactacgatacgggagcgcttaccatctggccccagtgctgcaatgataccgcgagacccacgctcaccggctccagatttatcagcaataaaccagccagccggaagggccgagcgcagaagtggtcctgcaactttatccgcctccattcagtctattaattgttgccgggaagctagagtaagtagttcgccagttaatagtttgcgcaacgttgttggcattgctacaggcatcgtggtgtcactctcgtcgtttggtatggcttcattcagctccggttcccaacgatcaaggcgagttacatgatcccccatgttgtgcaaaaaagcggttagctccttcggtcctccgatcgttgtcagaagtaagttggccgcagtgttatcactcatggttatggcagcactgcataattctcttactgtcatgccatccgtaagatgcttttctgtgactggtgagtactcaaccaagtcattctgagaatagtgtatgcggcgaccgagttgctcttgcccggcgtcaatacgggataatagtgtatcacatagcagaactttaaaagtgctcatcattggaaaacgttcttcggggcgaaaactctcaaggatcttaccgctgttgagatccagttcgatgtaacccactcgtgcacccaactgatcttcagcatcttttactttcaccagcgtttctgggtgagcaaaaacaggaaggcaaaatgccgcaaaaaagggaataagggcgacacggaaatgttgaatactcatactcttcctttttcaatgggtaataactgatataattaaattgaagctctaatttgtgagtttagtatacatgcatttacttataatacagttttttagttttgctggccgcatcttctcaaatatgcttcccagcctgcttttctgtaacgttcaccctctaccttagcatcccttccctttgcaaatagtcctcttccaacaataataatgtcagatcctgtagagaccacatcatccacggttctatactgttgacccaatgcgtctcccttgtcatctaaacccacaccgggtgtcataatcaaccaatcgtaaccttcatctcttccacccatgtctctttgagcaataaagccgataacaaaatctttgtcgctcttcgcaatgtcaacagtacccttagtatattctccagtagatagggagcccttgcatgacaattctgctaacatcaaaaggcctctaggttcctttgttacttcttctgccgcctgcttcaaaccgctaacaatacctgggcccaccacaccgtgtgcattcgtaatgtctgcccattctgctattctgtatacacccgcagagtactgcaatttgactgtattaccaatgtcagcaaattttctgtcttcg

SEQ ID NO: 348 - DNA, 7705 bp, Artificial Sequence
  PLAS447
aagagtaaaaaattgtacttggcggataatgcctttagcggcttaactgtgccctccatggaaaaatcagtcaagatatccacatgtgtttttagtaaacaaattttgggacctaatgcttcaactaactccagtaattccttggtggtacgaacatccaatgaagcacacaagtttgtttgcttttcgtgcatgatattaaatagcttggcagcaacaggactaggatgagtagcagcacgttccttatatgtagctttcgacatgatttatcttcgtttcctgcaggtttttgttctgtgcagttgggttaagaatactgggcaatttcatgtttcttcaacactacatatgcgtatatataccaatctaagtctgtgctccttccttcgttcttccttctgttcggagattaccgaatcaaaaaaatttcaaagaaaccgaaatcaaaaaaaagaataaaaaaaaaatgatgaattgaattgaaaagctagcttatcgatgataagctgtcaaagatgagaattaattccacggactatagactatactagatactccgtctactgtacgatacacttccgctcaggtccttgtcctttaacgaggccttaccactcttttgttactctattgatccagctcagcaaaggcagtgtgatctaagattctatcttcgcgatgtagtaaaactagctagaccgagaaagagactagaaatgcaaaaggcacttctacaatggctgccatcattattatccgatgtgacgctgcagcttctcaatgatattcgaatacgctttgaggagatacagcctaatatccgacaaactgttttacagatttacgatcgtacttgttacccatcattgaattttgaacatccgaacctgggagttttccctgaaacagatagtatatttgaacctgtataataatatatagtctagcgctttacggaagacaatgtatgtatttcggttcctggagaaactattgcatctattgcataggtaatcttgcacgtcgcatccccggttcattttctgcgtttccatcttgcacttcaatagcatatctttgttaacgaagcatctgtgcttcattttgtagaacaaaaatgcaacgcgagagcgctaatttttcaaacaaagaatctgagctgcatttttacagaacagaaatgcaacgcgaaagcgctattttaccaacgaagaatctgtgcttcatttttgtaaaacaaaaatgcaacgcgacgagagcgctaatttttcaaacaaagaatctgagctgcatttttacagaacagaaatgcaacgcgagagcgctattttaccaacaaagaatctatacttcttttttgttctacaaaaatgcatcccgagagcgctatttttctaacaaagcatcttagattactttttttctcctttgtgcgctctataatgcagtctcttgataactttttgcactgtaggtccgttaaggttagaagaaggctactttggtgtctattttctcttccataaaaaaagcctgactccacttcccgcgtttactgattactagcgaagctgcgggtgcattttttcaagataaaggcatccccgattatattctataccgatgtggattgcgcatactttgtgaacagaaagtgatagcgttgatgattcttcattggtcagaaaattatgaacggtttcttctattttgtctctatatactacgtataggaaatgtttacattttcgtattgttttcgattcactctatgaatagttcttactacaatttttttgtctaaagagtaatactagagataaacataaaaaatgtagaggtcgagtttagatgcaagttcaaggagcgaaaggtggatgggtaggttatatagggatatagcacagagatatatagcaaagagatacttttgagcaatgtttgtggaagcggtattcgcaatgggaagctccaccccggttgataatcagaaaagccccaaaaacaggaagattgtataagcaaatatttaaattgtaaacgttaatattttgttaaaattcgcgttaaatttttgttaaatcagctcattttttaacgaatagcccgaaatcggcaaaatcccttataaatcaaaagaatagaccgagatagggttgagtgttgttccagtttccaacaagagtccactattaaagaacgtggactccaacgtcaaagggcgaaaaagggtctatcagggcgatggcccactacgtgaaccatcaccctaatcaagttttttggggtcgaggtgccgtaaagcagtaaatcggaagggtaaacggatgcccccatttagagcttgacggggaaagccggcgaacgtggcgagaaaggaagggaagaaagcgaaaggagcgggggctagggcggtgggaagtgtaggggtcacgctgggcgtaaccaccacacccgccgcgcttaatggggcgctacagggcgcgtggggatgatccactagtacggattagaagccgccgagcgggtgacagccctccgaaggaagactctcctccgtgcgtcctcgtcttcaccggtcgcgttcctgaaacgcagatgtgcctcgcgccgcactgctccgaacaataaagattctacaatactagcttttatggttatgaagaggaaaaattggcagtaacctggccccacaaaccttcaaatgaacgaatcaaattaacaaccataggatgataatgcgattagttttttagccttatttctggggtaattaatcagcgaagcgatgatttttgatctattaacagatatataaatgcaaaaactgcataaccactttaactaatactttcaacattttcggtttgtattacttcttattcaaatgtaataaaagtatcaacaaaaaattgttaatatacctctatactttaacgtcaaggagaaaaaaccccggatcggactactagcagctgtaatacgactcactatagggaatattaagcttaaacaatgatgtactacggttgcttcaaggattttggtccagatccaccagcttggtcaccagatcctgaagctgctatgttgactaatgttggtcaattgctagagagaaggggtaaagaatttttgggttctgcttacaaggacccaatctcttcattttccaacttccaagaattctccgtgtctaacccagaagtttactggaaaactatcttggacgagatgtccatctctttttctgttccaccacaatgcatcttgtctgagaatacttctagggaatcttctttggctaatccaggtggtcaatggttgccaggtgcttatgttaatccagctaaaacttgtttgaccttgaactgcaagagaaacttggatgatgttgttatcaggtggagagatgaaggtaatgatgatatgccagtttcctcattgaccttggaagaattgagatctgaagtttggtatgctgttgcttacgctttgaatgctttgggtttggatagaggttctgctattgctattgatatgccaatgaacgtcgaatccgttattatctacttggctatagttttggccggtcacgttgttgtttctattgctgattcttttgccccattggaaatctctaccagattgaagatttctgaagccaaggctattttcacccaagacttgattattaggggtgacaagtccatcccattatactctagagttgttcatgctcaagctccaatggctatcgttttgccaacaaaaggttgtagcttctccatgaatttgagagatggtgatatctcctggcacgattttttggaaaaagctactgatttgaggggtgatgaatttgctgctgttgaacaaccagttgaagccttcaccaatatcttgttttcttctggtactaccggtgaacctaaagctattccatggactcatttgactccattcaaagctgctgctgatgcttggtgtcatatggatattagaaagggtgatatagttgcctggccaactaatttgggttggatgatgggtccttggttggtttatgcttctttgttgaatggtgcttccattgccttgtataatggttctccattgggttctggtttcgctaagtttgttcaagatgcttctgttaccatgttgggtgttattccatccatcgttagaatttggaagtctgctaattctacctctggttatgattggtctgctattagatgtttcgcttctactggtgaagctagctctgttgatgaatatttgtggttgatgggtagagcacagtacaagccaattattgaatattgcggtggtactgaaattggtggtggttttgtttctggttctttgttgcaaccacaatctttggctgctttttctactccagctatgggttgttctttgttcattttgggtgatgatggtcatccaatcccacaaaatgttccaggtatgggtgaattggctttgggtcctttgatgtttggtgcttcttctactttgttgaacgccgatcattacaacgtttactttaagggtatgccattgtggaacggtaagattttgagaaggcatggtgatgttttcgaaagaacttctagaggttactaccatgctcatggtagagctgatgatacaatgaatttgggtggtatcaaggtttcctccgttgaaattgaaagagtctgtaacgctgttgactccaacgttttggaaactgctgctgttggtgttccaccaccacaaggtggtccagaacaattggttattgctgttgttttcaaggactccgatgaatctactgttgatttggacaagttgagaatctcctacaattccgctgttcagaagaagttgaatcctttgttcagaatctcccacgttgttccattttcttcattgccaagaaccctcgagcatgcatctagagggccgcatcatgtaattagttatgtcacgcttacattcacgccctccccccacatccgctctaaccgaaaaggaaggagttagacaacctgaagtctaggtccctatttatttttttatagttatgttagtattaagaacgttatttatatttcaaatttttcttttttttctgtacagacgcgtgtacgcatgtaacattatactgaaaaccttgcttgagaaggttttgggacgctcgaaggctttaatttgcggccctgcattaatgaatcggccaacgcgcggggagaggcggtttgcgtattgggcgctcttccgcttcctcgctcactgactcgctgcgctcggtcgttcggctgcggcgagcggtatcagctcactcaaaggcggtaatacggttatccacagaatcaggggataacgcaggaaagaacatgtgagcaaaaggccagcaaaagcccaggaaccgtaaaaaggccgcgttgctggcgtttttccataggctccgcccccctgacgagcatcacaaaaatcgacgctcaagtcagaggtggcgaaacccgacaggactataaagataccaggcgtttccccctggaagctccctcgtgcgctctcctgttccgaccctgccgcttaccggatacctgtccgcctttctcccttcgggaagcgtggcgctttctcatagctcacgctgtaggtatctcagttcggtgtaggtcgttcgctccaagctgggctgtgtgcacgaaccccccgttcagcccgaccgctgcgccttatccggtaactatcgtcttgagtccaacccggtaagacacgacttatcgccactggcagcagccactggtaacaggattagcagagcgaggtatgtaggcggtgctacagagttcttgaagtggtggcctaactacggctacactagaaggacagtatttggtatctgcgctctgctgaagccagttaccttcggaaaaagagttggtagctcttgatccggcaaacaaaccaccgctggtagcggtggtttttttgtttgcaagcagcagattacgcgcagaaaaaaaggatctcaagaagatcctttgatcttttctacggggtctgacgctcagtggaacgaaaactcacgttaagggattttggtcatgagattatcaaaaaggatcttcacctagatccttttaaattaaaaatgaagttttaaatcaatctaaagtatatatgagtaaacttggtctgacagttaccaatgcttaatcagtgaggcacctatctcagcgatctgtctatttcgttcatccatagttgcctgactccccgtcgtgtagataactacgatacgggagcgcttaccatctggccccagtgctgcaatgataccgcgagacccacgctcaccggctccagatttatcagcaataaaccagccagccggaagggccgagcgcagaagtggtcctgcaactttatccgcctccattcagtctattaattgttgccgggaagctagagtaagtagttcgccagttaatagtttgcgcaacgttgttggcattgctacaggcatcgtggtgtcactctcgtcgtttggtatggcttcattcagctccggttcccaacgatcaaggcgagttacatgatcccccatgttgtgcaaaaaagcggttagctccttcggtcctccgatcgttgtcagaagtaagttggccgcagtgttatcactcatggttatggcagcactgcataattctcttactgtcatgccatccgtaagatgcttttctgtgactggtgagtactcaaccaagtcattctgagaatagtgtatgcggcgaccgagttgctcttgcccggcgtcaatacgggataatagtgtatcacatagcagaactttaaaagtgctcatcattggaaaacgttcttcggggcgaaaactctcaaggatcttaccgctgttgagatccagttcgatgtaacccactcgtgcacccaactgatcttcagcatcttttactttcaccagcgtttctgggtgagcaaaaacaggaaggcaaaatgccgcaaaaaagggaataagggcgacacggaaatgttgaatactcatactcttcctttttcaatgggtaataactgatataattaaattgaagctctaatttgtgagtttagtatacatgcatttacttataatacagttttttagttttgctggccgcatcttctcaaatatgcttcccagcctgcttttctgtaacgttcaccctctaccttagcatcccttccctttgcaaatagtcctcttccaacaataataatgtcagatcctgtagagaccacatcatccacggttctatactgttgacccaatgcgtctcccttgtcatctaaacccacaccgggtgtcataatcaaccaatcgtaaccttcatctcttccacccatgtctctttgagcaataaagccgataacaaaatctttgtcgctcttcgcaatgtcaacagtacccttagtatattctccagtagatagggagcccttgcatgacaattctgctaacatcaaaaggcctctaggttcctttgttacttcttctgccgcctgcttcaaaccgctaacaatacctgggcccaccacaccgtgtgcattcgtaatgtctgcccattctgctattctgtatacacccgcagagtactgcaatttgactgtattaccaatgtcagcaaattttctgtcttcg

SEQ ID NO: 349 - DNA, 7963 bp, Artificial Sequence
  PLAS448
aagagtaaaaaattgtacttggcggataatgcctttagcggcttaactgtgccctccatggaaaaatcagtcaagatatccacatgtgtttttagtaaacaaattttgggacctaatgcttcaactaactccagtaattccttggtggtacgaacatccaatgaagcacacaagtttgtttgcttttcgtgcatgatattaaatagcttggcagcaacaggactaggatgagtagcagcacgttccttatatgtagctttcgacatgatttatcttcgtttcctgcaggtttttgttctgtgcagttgggttaagaatactgggcaatttcatgtttcttcaacactacatatgcgtatatataccaatctaagtctgtgctccttccttcgttcttccttctgttcggagattaccgaatcaaaaaaatttcaaagaaaccgaaatcaaaaaaaagaataaaaaaaaaatgatgaattgaattgaaaagctagcttatcgatgataagctgtcaaagatgagaattaattccacggactatagactatactagatactccgtctactgtacgatacacttccgctcaggtccttgtcctttaacgaggccttaccactcttttgttactctattgatccagctcagcaaaggcagtgtgatctaagattctatcttcgcgatgtagtaaaactagctagaccgagaaagagactagaaatgcaaaaggcacttctacaatggctgccatcattattatccgatgtgacgctgcagcttctcaatgatattcgaatacgctttgaggagatacagcctaatatccgacaaactgttttacagatttacgatcgtacttgttacccatcattgaattttgaacatccgaacctgggagttttccctgaaacagatagtatatttgaacctgtataataatatatagtctagcgctttacggaagacaatgtatgtatttcggttcctggagaaactattgcatctattgcataggtaatcttgcacgtcgcatccccggttcattttctgcgtttccatcttgcacttcaatagcatatctttgttaacgaagcatctgtgcttcattttgtagaacaaaaatgcaacgcgagagcgctaatttttcaaacaaagaatctgagctgcatttttacagaacagaaatgcaacgcgaaagcgctattttaccaacgaagaatctgtgcttcatttttgtaaaacaaaaatgcaacgcgacgagagcgctaatttttcaaacaaagaatctgagctgcatttttacagaacagaaatgcaacgcgagagcgctattttaccaacaaagaatctatacttcttttttgttctacaaaaatgcatcccgagagcgctatttttctaacaaagcatcttagattactttttttctcctttgtgcgctctataatgcagtctcttgataactttttgcactgtaggtccgttaaggttagaagaaggctactttggtgtctattttctcttccataaaaaaagcctgactccacttcccgcgtttactgattactagcgaagctgcgggtgcattttttcaagataaaggcatccccgattatattctataccgatgtggattgcgcatactttgtgaacagaaagtgatagcgttgatgattcttcattggtcagaaaattatgaacggtttcttctattttgtctctatatactacgtataggaaatgtttacattttcgtattgttttcgattcactctatgaatagttcttactacaatttttttgtctaaagagtaatactagagataaacataaaaaatgtagaggtcgagtttagatgcaagttcaaggagcgaaaggtggatgggtaggttatatagggatatagcacagagatatatagcaaagagatacttttgagcaatgtttgtggaagcggtattcgcaatgggaagctccaccccggttgataatcagaaaagccccaaaaacaggaagattgtataagcaaatatttaaattgtaaacgttaatattttgttaaaattcgcgttaaatttttgttaaatcagctcattttttaacgaatagcccgaaatcggcaaaatcccttataaatcaaaagaatagaccgagatagggttgagtgttgttccagtttccaacaagagtccactattaaagaacgtggactccaacgtcaaagggcgaaaaagggtctatcagggcgatggcccactacgtgaaccatcaccctaatcaagttttttggggtcgaggtgccgtaaagcagtaaatcggaagggtaaacggatgcccccatttagagcttgacggggaaagccggcgaacgtggcgagaaaggaagggaagaaagcgaaaggagcgggggctagggcggtgggaagtgtaggggtcacgctgggcgtaaccaccacacccgccgcgcttaatggggcgctacagggcgcgtggggatgatccactagtacggattagaagccgccgagcgggtgacagccctccgaaggaagactctcctccgtgcgtcctcgtcttcaccggtcgcgttcctgaaacgcagatgtgcctcgcgccgcactgctccgaacaataaagattctacaatactagcttttatggttatgaagaggaaaaattggcagtaacctggccccacaaaccttcaaatgaacgaatcaaattaacaaccataggatgataatgcgattagttttttagccttatttctggggtaattaatcagcgaagcgatgatttttgatctattaacagatatataaatgcaaaaactgcataaccactttaactaatactttcaacattttcggtttgtattacttcttattcaaatgtaataaaagtatcaacaaaaaattgttaatatacctctatactttaacgtcaaggagaaaaaaccccggatcggactactagcagctgtaatacgactcactatagggaatattaagcttaaacaatggctggtaagaccttggattctattacctctcaagatattgctgccttgggtattccatctgaagaagctgaaaaattgcaccaaaccttgttgcaaattatcacctcttgtggtgctgctactccacaaacttggtctagaatctccaaagagttgttgaatccagacttgccatactccttgcatcaaatgatgtattacggttgctactctcattttggtccagatccaccagcttggttgccagatccagaaaatgttatgttgactaacgttggtcagttgttggaaagaaggggtaaagaatttttgggctccagatacaaggatccaatctcttctttttccgacttccaaaaattctccgtgtctaacccagaagtttactggaaaactgttttggacgagttgtccatctctttttctgttccaccacaatgtgtcttgtacgataatccatctagagagaacggtttgtcttatccaggtggtcaatggttgccaggtgcttttatcaatccagctagaaactgtttgtccgtcaacgataagagaactttggatgataccgttgttatctggcatgatgaaggtgatgatggtatgccaatcaacagaatgactttggaagaattgagaagggaagtttggtctgttgcttacgctttagatactttgggtttggaaaagggttccgctattgctattgatatgccaatgaatgcttcctccgttgtcatctatttggctatagttttggctggttacatcgttgtttccattgctgattctttcgcctccagagaaatttctaccagattgaagatttccaacgccaaggctattttcacccaagatttcattatcaggggtgacaagtctttgccattatactctagagttgttgatgctcaatctccaaccgctatagttattccagctggtggttcttcattctccatgaagttgagagatggtgatatgtcttggcacgatttcttgcaaagagctatcaactctagagatgatgaattcgctgctattgaacaacctattgaagccttcatgaacatcttgttctcttcaggtactactggtgaacctaaagctattccatggactaatgctactccattgaaagctgctgctgatgcttggtgtcatatggatattagaaagggtgatatagttgcctggccaactaatttgggttggatgatgggtccttggttggtttatgcttctttgttgaatggtgctaccattgccttgtataatggtgctccattaggttctggtttcgctaagtttgttcaagatgctaaggttaccatgttgggtgttattccatctatcgttagaacttggaagtctaccaactgtactgctggtttggattggtcatctattagatgttttgcttctactggtgaagcctcctctgttgatgaatatttgtggttgatgggtagagcacagtacaagccaattattgaatattgcggtggtactgaaattggtggtggttttgttactggttctttgttgcaagctcaatccttggcttcattttctactccagctatgggttgctccttgttcattattggtgatgacggtaatttgttgccacaagatgcttcaggtatgggtgaattggctttgggtccattgatgtttggtgcttctactactttgttgaacgccgatcattacgatgtttactttaagggtatgcctatctggaacggtaaagttttgagaaggcatggtgatgttttcgaaagaacttctagaggttactacagagcacatggtagagctgatgataccatgaatattggtggtatcaaggtttcctccgtcgaaattgaaagaatctgcaataccgttcactcctctgttttggaaactgctgctattggtatgcctccaccagccggtggtccagaaagattgatgatagttgttgttttcaaggactccaacaactccattccagatttgaacgaattgagaatcgccttcaattccgaagtccaaaagaagttgaatcctttgttcagagtttcccatactgttccagttccatctttgccaagaactgctacaaacaaggttatgagaagagtcttgagacaacaattggctcaattgtcctctacctctaagttcctcgagcatgcatctagagggccgcatcatgtaattagttatgtcacgcttacattcacgccctccccccacatccgctctaaccgaaaaggaaggagttagacaacctgaagtctaggtccctatttatttttttatagttatgttagtattaagaacgttatttatatttcaaatttttcttttttttctgtacagacgcgtgtacgcatgtaacattatactgaaaaccttgcttgagaaggttttgggacgctcgaaggctttaatttgcggccctgcattaatgaatcggccaacgcgcggggagaggcggtttgcgtattgggcgctcttccgcttcctcgctcactgactcgctgcgctcggtcgttcggctgcggcgagcggtatcagctcactcaaaggcggtaatacggttatccacagaatcaggggataacgcaggaaagaacatgtgagcaaaaggccagcaaaagcccaggaaccgtaaaaaggccgcgttgctggcgtttttccataggctccgcccccctgacgagcatcacaaaaatcgacgctcaagtcagaggtggcgaaacccgacaggactataaagataccaggcgtttccccctggaagctccctcgtgcgctctcctgttccgaccctgccgcttaccggatacctgtccgcctttctcccttcgggaagcgtggcgctttctcatagctcacgctgtaggtatctcagttcggtgtaggtcgttcgctccaagctgggctgtgtgcacgaaccccccgttcagcccgaccgctgcgccttatccggtaactatcgtcttgagtccaacccggtaagacacgacttatcgccactggcagcagccactggtaacaggattagcagagcgaggtatgtaggcggtgctacagagttcttgaagtggtggcctaactacggctacactagaaggacagtatttggtatctgcgctctgctgaagccagttaccttcggaaaaagagttggtagctcttgatccggcaaacaaaccaccgctggtagcggtggtttttttgtttgcaagcagcagattacgcgcagaaaaaaaggatctcaagaagatcctttgatcttttctacggggtctgacgctcagtggaacgaaaactcacgttaagggattttggtcatgagattatcaaaaaggatcttcacctagatccttttaaattaaaaatgaagttttaaatcaatctaaagtatatatgagtaaacttggtctgacagttaccaatgcttaatcagtgaggcacctatctcagcgatctgtctatttcgttcatccatagttgcctgactccccgtcgtgtagataactacgatacgggagcgcttaccatctggccccagtgctgcaatgataccgcgagacccacgctcaccggctccagatttatcagcaataaaccagccagccggaagggccgagcgcagaagtggtcctgcaactttatccgcctccattcagtctattaattgttgccgggaagctagagtaagtagttcgccagttaatagtttgcgcaacgttgttggcattgctacaggcatcgtggtgtcactctcgtcgtttggtatggcttcattcagctccggttcccaacgatcaaggcgagttacatgatcccccatgttgtgcaaaaaagcggttagctccttcggtcctccgatcgttgtcagaagtaagttggccgcagtgttatcactcatggttatggcagcactgcataattctcttactgtcatgccatccgtaagatgcttttctgtgactggtgagtactcaaccaagtcattctgagaatagtgtatgcggcgaccgagttgctcttgcccggcgtcaatacgggataatagtgtatcacatagcagaactttaaaagtgctcatcattggaaaacgttcttcggggcgaaaactctcaaggatcttaccgctgttgagatccagttcgatgtaacccactcgtgcacccaactgatcttcagcatcttttactttcaccagcgtttctgggtgagcaaaaacaggaaggcaaaatgccgcaaaaaagggaataagggcgacacggaaatgttgaatactcatactcttcctttttcaatgggtaataactgatataattaaattgaagctctaatttgtgagtttagtatacatgcatttacttataatacagttttttagttttgctggccgcatcttctcaaatatgcttcccagcctgcttttctgtaacgttcaccctctaccttagcatcccttccctttgcaaatagtcctcttccaacaataataatgtcagatcctgtagagaccacatcatccacggttctatactgttgacccaatgcgtctcccttgtcatctaaacccacaccgggtgtcataatcaaccaatcgtaaccttcatctcttccacccatgtctctttgagcaataaagccgataacaaaatctttgtcgctcttcgcaatgtcaacagtacccttagtatattctccagtagatagggagcccttgcatgacaattctgctaacatcaaaaggcctctaggttcctttgttacttcttctgccgcctgcttcaaaccgctaacaatacctgggcccaccacaccgtgtgcattcgtaatgtctgcccattctgctattctgtatacacccgcagagtactgcaatttgactgtattaccaatgtcagcaaattttctgtcttcg

SEQ ID NO: 350 - DNA, 7951 bp, Artificial Sequence
  PLAS449
aagagtaaaaaattgtacttggcggataatgcctttagcggcttaactgtgccctccatggaaaaatcagtcaagatatccacatgtgtttttagtaaacaaattttgggacctaatgcttcaactaactccagtaattccttggtggtacgaacatccaatgaagcacacaagtttgtttgcttttcgtgcatgatattaaatagcttggcagcaacaggactaggatgagtagcagcacgttccttatatgtagctttcgacatgatttatcttcgtttcctgcaggtttttgttctgtgcagttgggttaagaatactgggcaatttcatgtttcttcaacactacatatgcgtatatataccaatctaagtctgtgctccttccttcgttcttccttctgttcggagattaccgaatcaaaaaaatttcaaagaaaccgaaatcaaaaaaaagaataaaaaaaaaatgatgaattgaattgaaaagctagcttatcgatgataagctgtcaaagatgagaattaattccacggactatagactatactagatactccgtctactgtacgatacacttccgctcaggtccttgtcctttaacgaggccttaccactcttttgttactctattgatccagctcagcaaaggcagtgtgatctaagattctatcttcgcgatgtagtaaaactagctagaccgagaaagagactagaaatgcaaaaggcacttctacaatggctgccatcattattatccgatgtgacgctgcagcttctcaatgatattcgaatacgctttgaggagatacagcctaatatccgacaaactgttttacagatttacgatcgtacttgttacccatcattgaattttgaacatccgaacctgggagttttccctgaaacagatagtatatttgaacctgtataataatatatagtctagcgctttacggaagacaatgtatgtatttcggttcctggagaaactattgcatctattgcataggtaatcttgcacgtcgcatccccggttcattttctgcgtttccatcttgcacttcaatagcatatctttgttaacgaagcatctgtgcttcattttgtagaacaaaaatgcaacgcgagagcgctaatttttcaaacaaagaatctgagctgcatttttacagaacagaaatgcaacgcgaaagcgctattttaccaacgaagaatctgtgcttcatttttgtaaaacaaaaatgcaacgcgacgagagcgctaatttttcaaacaaagaatctgagctgcatttttacagaacagaaatgcaacgcgagagcgctattttaccaacaaagaatctatacttcttttttgttctacaaaaatgcatcccgagagcgctatttttctaacaaagcatcttagattactttttttctcctttgtgcgctctataatgcagtctcttgataactttttgcactgtaggtccgttaaggttagaagaaggctactttggtgtctattttctcttccataaaaaaagcctgactccacttcccgcgtttactgattactagcgaagctgcgggtgcattttttcaagataaaggcatccccgattatattctataccgatgtggattgcgcatactttgtgaacagaaagtgatagcgttgatgattcttcattggtcagaaaattatgaacggtttcttctattttgtctctatatactacgtataggaaatgtttacattttcgtattgttttcgattcactctatgaatagttcttactacaatttttttgtctaaagagtaatactagagataaacataaaaaatgtagaggtcgagtttagatgcaagttcaaggagcgaaaggtggatgggtaggttatatagggatatagcacagagatatatagcaaagagatacttttgagcaatgtttgtggaagcggtattcgcaatgggaagctccaccccggttgataatcagaaaagccccaaaaacaggaagattgtataagcaaatatttaaattgtaaacgttaatattttgttaaaattcgcgttaaatttttgttaaatcagctcattttttaacgaatagcccgaaatcggcaaaatcccttataaatcaaaagaatagaccgagatagggttgagtgttgttccagtttccaacaagagtccactattaaagaacgtggactccaacgtcaaagggcgaaaaagggtctatcagggcgatggcccactacgtgaaccatcaccctaatcaagttttttggggtcgaggtgccgtaaagcagtaaatcggaagggtaaacggatgcccccatttagagcttgacggggaaagccggcgaacgtggcgagaaaggaagggaagaaagcgaaaggagcgggggctagggcggtgggaagtgtaggggtcacgctgggcgtaaccaccacacccgccgcgcttaatggggcgctacagggcgcgtggggatgatccactagtacggattagaagccgccgagcgggtgacagccctccgaaggaagactctcctccgtgcgtcctcgtcttcaccggtcgcgttcctgaaacgcagatgtgcctcgcgccgcactgctccgaacaataaagattctacaatactagcttttatggttatgaagaggaaaaattggcagtaacctggccccacaaaccttcaaatgaacgaatcaaattaacaaccataggatgataatgcgattagttttttagccttatttctggggtaattaatcagcgaagcgatgatttttgatctattaacagatatataaatgcaaaaactgcataaccactttaactaatactttcaacattttcggtttgtattacttcttattcaaatgtaataaaagtatcaacaaaaaattgttaatatacctctatactttaacgtcaaggagaaaaaaccccggatcggactactagcagctgtaatacgactcactatagggaatattaagcttaaacaatggctgctgaattgcataagccattgggtgctattactgctgatgatttggctgctgctgctccaggttgtgatgctactgctttacattctgctttgagaagggctttggattctcatggtccagctgctgtttgggctgaattgtgtagatctgttttaagaccatctgttccattcgccgttcatagaatgttgtactatggttgttttgccggttttccatctccaactccaccagcttggactccagatccaaaagaagctgctttgactaacgttggtagagttttggaagctagaggtagagattttattggtgatgcttacaaggatccaatcacatcttttccagacttgcacaagttctctaacgaaaacccagaaacttactggaagatggtgtttgaagaaatgggtgttcaattctccgttgagccatcttgtatttggagagaaaatgctgcttatccaggtggtgaatggttgccaggtgctgaattgaatgctgctgctaactgtttgactgctaaaccaggtagatcttctgattctccagctatagtttggagagatgaaggtaaagattccgagccattgaacttcatgtctttggaagaattgagaaagaagtcctccttggttgctaatgctttggatgctttagaattgccaaagggttctgctattgctatcgatatgccaatggatgttaacgccgttgttatctatttggctatagttttggctggttacgtcgttgtttctattgctgattcttttgctgctccagccatttctatgagattgaagatttctgaagccaaggccattttcacccaagattacattttgagggacgacaaagaattgccactatactctagagttgttgaagttaaggctccaatggctatcgttattccagttagaggttctttgccaatcaagggtttgagagttgatgatttgtcttggcaagatttcttgggtagagttaacaacactgaagccgaaaattacattgccgttaagcaaccagctgatgctttcaccaatatcttgttttcttctggtactaccggtgaacctaaagctattccatggactcatattactccattgaaagctgctgcagatggttggtgtcatatggatattagaaagggtgatgttgttgcttggccaactaatttgggttggatgatgggtccttggttggtttatgcttctttgttgaatggtgcttctatggccttgtataatggttctccaaattcttctggtttcgccaagtttgttcaagatgctaaggttactatgttgggtttggttccatctattgctagaacttggaagaacactgattgcactgctggtttggattggtcatctattagatgcttttctagttctggtgaagcctcctctgttgatgattatttgtggttgatgggtagagctggttacaagccagttattgaatattgtggtggtactgaaattggtggtggttttgttactggttctttgttgcaaccacaagccttgtctgctttttctactccagctatgggttgcaacttgttcattttggattctaacggtaacccattgccacaagattctgttggtattggtgaattggctttggatccaactttgttcggttcttctactactttgttgaacgccgatcatcaagaagtttactttaacggtatgccagaatggcatggtaagattttgagaaggcatggtgatgaattcgaaagaacttctgatggttactacagagcacatggtagagctgatgatacaatgaatttgggtggtatcaaggtgtcctccattgaaattgaaagaatctgcaacagagttcacgatgctatagttgaaactgctgctattggtgttccaccagttggtggtggtccagaacaattgactattgctgttgttttgaaggaccagtcctctcaattggaagattggaatcaattgaagttggctttcaacgttgccttgaagaagttgaatcctttgttcaaggtttcctccgttgttgttgttccatctttgccaagaactgcttctaacaaggttatgagaagagtcttgaggaaagaattctctcaagctgctcaagccaaacactctaagattctcgagcatgcatctagagggccgcatcatgtaattagttatgtcacgcttacattcacgccctccccccacatccgctctaaccgaaaaggaaggagttagacaacctgaagtctaggtccctatttatttttttatagttatgttagtattaagaacgttatttatatttcaaatttttcttttttttctgtacagacgcgtgtacgcatgtaacattatactgaaaaccttgcttgagaaggttttgggacgctcgaaggctttaatttgcggccctgcattaatgaatcggccaacgcgcggggagaggcggtttgcgtattgggcgctcttccgcttcctcgctcactgactcgctgcgctcggtcgttcggctgcggcgagcggtatcagctcactcaaaggcggtaatacggttatccacagaatcaggggataacgcaggaaagaacatgtgagcaaaaggccagcaaaagcccaggaaccgtaaaaaggccgcgttgctggcgtttttccataggctccgcccccctgacgagcatcacaaaaatcgacgctcaagtcagaggtggcgaaacccgacaggactataaagataccaggcgtttccccctggaagctccctcgtgcgctctcctgttccgaccctgccgcttaccggatacctgtccgcctttctcccttcgggaagcgtggcgctttctcatagctcacgctgtaggtatctcagttcggtgtaggtcgttcgctccaagctgggctgtgtgcacgaaccccccgttcagcccgaccgctgcgccttatccggtaactatcgtcttgagtccaacccggtaagacacgacttatcgccactggcagcagccactggtaacaggattagcagagcgaggtatgtaggcggtgctacagagttcttgaagtggtggcctaactacggctacactagaaggacagtatttggtatctgcgctctgctgaagccagttaccttcggaaaaagagttggtagctcttgatccggcaaacaaaccaccgctggtagcggtggtttttttgtttgcaagcagcagattacgcgcagaaaaaaaggatctcaagaagatcctttgatcttttctacggggtctgacgctcagtggaacgaaaactcacgttaagggattttggtcatgagattatcaaaaaggatcttcacctagatccttttaaattaaaaatgaagttttaaatcaatctaaagtatatatgagtaaacttggtctgacagttaccaatgcttaatcagtgaggcacctatctcagcgatctgtctatttcgttcatccatagttgcctgactccccgtcgtgtagataactacgatacgggagcgcttaccatctggccccagtgctgcaatgataccgcgagacccacgctcaccggctccagatttatcagcaataaaccagccagccggaagggccgagcgcagaagtggtcctgcaactttatccgcctccattcagtctattaattgttgccgggaagctagagtaagtagttcgccagttaatagtttgcgcaacgttgttggcattgctacaggcatcgtggtgtcactctcgtcgtttggtatggcttcattcagctccggttcccaacgatcaaggcgagttacatgatcccccatgttgtgcaaaaaagcggttagctccttcggtcctccgatcgttgtcagaagtaagttggccgcagtgttatcactcatggttatggcagcactgcataattctcttactgtcatgccatccgtaagatgcttttctgtgactggtgagtactcaaccaagtcattctgagaatagtgtatgcggcgaccgagttgctcttgcccggcgtcaatacgggataatagtgtatcacatagcagaactttaaaagtgctcatcattggaaaacgttcttcggggcgaaaactctcaaggatcttaccgctgttgagatccagttcgatgtaacccactcgtgcacccaactgatcttcagcatcttttactttcaccagcgtttctgggtgagcaaaaacaggaaggcaaaatgccgcaaaaaagggaataagggcgacacggaaatgttgaatactcatactcttcctttttcaatgggtaataactgatataattaaattgaagctctaatttgtgagtttagtatacatgcatttacttataatacagttttttagttttgctggccgcatcttctcaaatatgcttcccagcctgcttttctgtaacgttcaccctctaccttagcatcccttccctttgcaaatagtcctcttccaacaataataatgtcagatcctgtagagaccacatcatccacggttctatactgttgacccaatgcgtctcccttgtcatctaaacccacaccgggtgtcataatcaaccaatcgtaaccttcatctcttccacccatgtctctttgagcaataaagccgataacaaaatctttgtcgctcttcgcaatgtcaacagtacccttagtatattctccagtagatagggagcccttgcatgacaattctgctaacatcaaaaggcctctaggttcctttgttacttcttctgccgcctgcttcaaaccgctaacaatacctgggcccaccacaccgtgtgcattcgtaatgtctgcccattctgctattctgtatacacccgcagagtactgcaatttgactgtattaccaatgtcagcaaattttctgtcttcg

SEQ ID NO: 351 - DNA, 7951 bp, Artificial Sequence
  PLAS450
aagagtaaaaaattgtacttggcggataatgcctttagcggcttaactgtgccctccatggaaaaatcagtcaagatatccacatgtgtttttagtaaacaaattttgggacctaatgcttcaactaactccagtaattccttggtggtacgaacatccaatgaagcacacaagtttgtttgcttttcgtgcatgatattaaatagcttggcagcaacaggactaggatgagtagcagcacgttccttatatgtagctttcgacatgatttatcttcgtttcctgcaggtttttgttctgtgcagttgggttaagaatactgggcaatttcatgtttcttcaacactacatatgcgtatatataccaatctaagtctgtgctccttccttcgttcttccttctgttcggagattaccgaatcaaaaaaatttcaaagaaaccgaaatcaaaaaaaagaataaaaaaaaaatgatgaattgaattgaaaagctagcttatcgatgataagctgtcaaagatgagaattaattccacggactatagactatactagatactccgtctactgtacgatacacttccgctcaggtccttgtcctttaacgaggccttaccactcttttgttactctattgatccagctcagcaaaggcagtgtgatctaagattctatcttcgcgatgtagtaaaactagctagaccgagaaagagactagaaatgcaaaaggcacttctacaatggctgccatcattattatccgatgtgacgctgcagcttctcaatgatattcgaatacgctttgaggagatacagcctaatatccgacaaactgttttacagatttacgatcgtacttgttacccatcattgaattttgaacatccgaacctgggagttttccctgaaacagatagtatatttgaacctgtataataatatatagtctagcgctttacggaagacaatgtatgtatttcggttcctggagaaactattgcatctattgcataggtaatcttgcacgtcgcatccccggttcattttctgcgtttccatcttgcacttcaatagcatatctttgttaacgaagcatctgtgcttcattttgtagaacaaaaatgcaacgcgagagcgctaatttttcaaacaaagaatctgagctgcatttttacagaacagaaatgcaacgcgaaagcgctattttaccaacgaagaatctgtgcttcatttttgtaaaacaaaaatgcaacgcgacgagagcgctaatttttcaaacaaagaatctgagctgcatttttacagaacagaaatgcaacgcgagagcgctattttaccaacaaagaatctatacttcttttttgttctacaaaaatgcatcccgagagcgctatttttctaacaaagcatcttagattactttttttctcctttgtgcgctctataatgcagtctcttgataactttttgcactgtaggtccgttaaggttagaagaaggctactttggtgtctattttctcttccataaaaaaagcctgactccacttcccgcgtttactgattactagcgaagctgcgggtgcattttttcaagataaaggcatccccgattatattctataccgatgtggattgcgcatactttgtgaacagaaagtgatagcgttgatgattcttcattggtcagaaaattatgaacggtttcttctattttgtctctatatactacgtataggaaatgtttacattttcgtattgttttcgattcactctatgaatagttcttactacaatttttttgtctaaagagtaatactagagataaacataaaaaatgtagaggtcgagtttagatgcaagttcaaggagcgaaaggtggatgggtaggttatatagggatatagcacagagatatatagcaaagagatacttttgagcaatgtttgtggaagcggtattcgcaatgggaagctccaccccggttgataatcagaaaagccccaaaaacaggaagattgtataagcaaatatttaaattgtaaacgttaatattttgttaaaattcgcgttaaatttttgttaaatcagctcattttttaacgaatagcccgaaatcggcaaaatcccttataaatcaaaagaatagaccgagatagggttgagtgttgttccagtttccaacaagagtccactattaaagaacgtggactccaacgtcaaagggcgaaaaagggtctatcagggcgatggcccactacgtgaaccatcaccctaatcaagttttttggggtcgaggtgccgtaaagcagtaaatcggaagggtaaacggatgcccccatttagagcttgacggggaaagccggcgaacgtggcgagaaaggaagggaagaaagcgaaaggagcgggggctagggcggtgggaagtgtaggggtcacgctgggcgtaaccaccacacccgccgcgcttaatggggcgctacagggcgcgtggggatgatccactagtacggattagaagccgccgagcgggtgacagccctccgaaggaagactctcctccgtgcgtcctcgtcttcaccggtcgcgttcctgaaacgcagatgtgcctcgcgccgcactgctccgaacaataaagattctacaatactagcttttatggttatgaagaggaaaaattggcagtaacctggccccacaaaccttcaaatgaacgaatcaaattaacaaccataggatgataatgcgattagttttttagccttatttctggggtaattaatcagcgaagcgatgatttttgatctattaacagatatataaatgcaaaaactgcataaccactttaactaatactttcaacattttcggtttgtattacttcttattcaaatgtaataaaagtatcaacaaaaaattgttaatatacctctatactttaacgtcaaggagaaaaaaccccggatcggactactagcagctgtaatacgactcactatagggaatattaagcttaaacaatggcctacaaatccttggatgccatttccgtttctgatattcaagccttgggtattgcttctccagctgctgaaaagttgttcaaagaaatctccgatatcatcacccattatggtgctgctactccacaaacttggtctagaatttctaagaggttgttgaacccagacttgccattttccttccatcaaattatgtactacggttgctacaaggattttggtccagatccaccagcttggttgccagatccaaaaactgctggttttactaatgtctggaagttgttggaaaagaggggttacgaatttttgggctctaattacttggacccaatctcttcattttccgcctttcaagaattctccgtttctaacccagaagtctactggaaaactgttttggacgaaatgtccgtttctttctctgttccaccacaatgcattttgagagaagattctccattgtctaatccaggtggtcaatggttgccaggtgctcatttgaatccagctaaaaactgtttgtccttgaactccgaatcctcctctaatgatgttgctattacttggagagatgaaggttctgatcatttgccagtttcttgtatgaccttggaagaattgagaaccgaagtttggtctgttgcttatgctttgaatgctttgggtttggatagaggtgctgctattgctattaacatgccaatgaacgttaagtccgtcattatctacttggctatagttttggctggttacgttgttgtttccattgctgattcttttgccccagttgaaatttccaccagattgaagatttctcaagccaaggctattttcacccaagacttgattattaggggtgagaagtccatcccattatactctagagttgttgatgctcaatctccaatggctatcgttattccaactaagggttctaacttctccatgaagttgagagatggtgatatctcttggagagactttttggaaagagtcaacaacttgaggggtaatgaatttgctgctgttgaacaaccagttgaagcctacaccaatatcttgttttcttctggtactaccggtgaacctaaagctattccatggattaacgctactccattgaaagctgctgctgatgcttggtgtcatatggatattagaaagggtgatatagttgcctggccaactaatttgggttggatgatgggtccttggttggtttatgcttctttgttgaatggtgcttgcattgccttgtataacggttctccaattggttctggtttcgctaagtttgttcaagatgctaaggttaccatcttgggtgttattccatctatcgttagaacttggaagtctaccaactgtactgctggttatgattggtctgctattagatgttttggttctactggtgaagcctccaatgttgatgaatatttgtggttgatgggtagagcacattacaagccaattattgaatactgcggtggtactgaaattggtggtgcttttattactggttccttgttgcaaccacaatctttggctgctttttctactccaactatgggttgctctttgttcattttgggtaatgatggttacccaatcccacataatgttccaggtatgggtgaattggctttgggttctttgatgtttggtgcttcttcatctttattgaacggtgatcactacaaggtctactacaaaggtatgccagtttggaacggtaagattttgagaaggcatggtgatgttttcgaaagaacttctagaggttactaccatgctcatggtagagctgatgatacaatgaatttgggtggtatcaaggtttcctccgttgaattggaaagattgtgtaatgctgccgactcctctattttggaaactgctgctattggtgttccaccaccacaaggtggtccagaaagattggttattgctgttgtttttaagcacccagataactctactccagatttggaagagttgaagaagtctttcaactccgttgtccaaaagaagttgaatcctttgttcagagtttccagagttgttccattgccatctttgccaagaactgctacaaacaaggttatgagaagaatcttgagacagagattcgtccaaagagaacagaactctaagttgctcgagcatgcatctagagggccgcatcatgtaattagttatgtcacgcttacattcacgccctccccccacatccgctctaaccgaaaaggaaggagttagacaacctgaagtctaggtccctatttatttttttatagttatgttagtattaagaacgttatttatatttcaaatttttcttttttttctgtacagacgcgtgtacgcatgtaacattatactgaaaaccttgcttgagaaggttttgggacgctcgaaggctttaatttgcggccctgcattaatgaatcggccaacgcgcggggagaggcggtttgcgtattgggcgctcttccgcttcctcgctcactgactcgctgcgctcggtcgttcggctgcggcgagcggtatcagctcactcaaaggcggtaatacggttatccacagaatcaggggataacgcaggaaagaacatgtgagcaaaaggccagcaaaagcccaggaaccgtaaaaaggccgcgttgctggcgtttttccataggctccgcccccctgacgagcatcacaaaaatcgacgctcaagtcagaggtggcgaaacccgacaggactataaagataccaggcgtttccccctggaagctccctcgtgcgctctcctgttccgaccctgccgcttaccggatacctgtccgcctttctcccttcgggaagcgtggcgctttctcatagctcacgctgtaggtatctcagttcggtgtaggtcgttcgctccaagctgggctgtgtgcacgaaccccccgttcagcccgaccgctgcgccttatccggtaactatcgtcttgagtccaacccggtaagacacgacttatcgccactggcagcagccactggtaacaggattagcagagcgaggtatgtaggcggtgctacagagttcttgaagtggtggcctaactacggctacactagaaggacagtatttggtatctgcgctctgctgaagccagttaccttcggaaaaagagttggtagctcttgatccggcaaacaaaccaccgctggtagcggtggtttttttgtttgcaagcagcagattacgcgcagaaaaaaaggatctcaagaagatcctttgatcttttctacggggtctgacgctcagtggaacgaaaactcacgttaagggattttggtcatgagattatcaaaaaggatcttcacctagatccttttaaattaaaaatgaagttttaaatcaatctaaagtatatatgagtaaacttggtctgacagttaccaatgcttaatcagtgaggcacctatctcagcgatctgtctatttcgttcatccatagttgcctgactccccgtcgtgtagataactacgatacgggagcgcttaccatctggccccagtgctgcaatgataccgcgagacccacgctcaccggctccagatttatcagcaataaaccagccagccggaagggccgagcgcagaagtggtcctgcaactttatccgcctccattcagtctattaattgttgccgggaagctagagtaagtagttcgccagttaatagtttgcgcaacgttgttggcattgctacaggcatcgtggtgtcactctcgtcgtttggtatggcttcattcagctccggttcccaacgatcaaggcgagttacatgatcccccatgttgtgcaaaaaagcggttagctccttcggtcctccgatcgttgtcagaagtaagttggccgcagtgttatcactcatggttatggcagcactgcataattctcttactgtcatgccatccgtaagatgcttttctgtgactggtgagtactcaaccaagtcattctgagaatagtgtatgcggcgaccgagttgctcttgcccggcgtcaatacgggataatagtgtatcacatagcagaactttaaaagtgctcatcattggaaaacgttcttcggggcgaaaactctcaaggatcttaccgctgttgagatccagttcgatgtaacccactcgtgcacccaactgatcttcagcatcttttactttcaccagcgtttctgggtgagcaaaaacaggaaggcaaaatgccgcaaaaaagggaataagggcgacacggaaatgttgaatactcatactcttcctttttcaatgggtaataactgatataattaaattgaagctctaatttgtgagtttagtatacatgcatttacttataatacagttttttagttttgctggccgcatcttctcaaatatgcttcccagcctgcttttctgtaacgttcaccctctaccttagcatcccttccctttgcaaatagtcctcttccaacaataataatgtcagatcctgtagagaccacatcatccacggttctatactgttgacccaatgcgtctcccttgtcatctaaacccacaccgggtgtcataatcaaccaatcgtaaccttcatctcttccacccatgtctctttgagcaataaagccgataacaaaatctttgtcgctcttcgcaatgtcaacagtacccttagtatattctccagtagatagggagcccttgcatgacaattctgctaacatcaaaaggcctctaggttcctttgttacttcttctgccgcctgcttcaaaccgctaacaatacctgggcccaccacaccgtgtgcattcgtaatgtctgcccattctgctattctgtatacacccgcagagtactgcaatttgactgtattaccaatgtcagcaaattttctgtcttcg

SEQ ID NO: 352 - DNA, 8017 bp, Artificial Sequence
  PLAS451
aagagtaaaaaattgtacttggcggataatgcctttagcggcttaactgtgccctccatggaaaaatcagtcaagatatccacatgtgtttttagtaaacaaattttgggacctaatgcttcaactaactccagtaattccttggtggtacgaacatccaatgaagcacacaagtttgtttgcttttcgtgcatgatattaaatagcttggcagcaacaggactaggatgagtagcagcacgttccttatatgtagctttcgacatgatttatcttcgtttcctgcaggtttttgttctgtgcagttgggttaagaatactgggcaatttcatgtttcttcaacactacatatgcgtatatataccaatctaagtctgtgctccttccttcgttcttccttctgttcggagattaccgaatcaaaaaaatttcaaagaaaccgaaatcaaaaaaaagaataaaaaaaaaatgatgaattgaattgaaaagctagcttatcgatgataagctgtcaaagatgagaattaattccacggactatagactatactagatactccgtctactgtacgatacacttccgctcaggtccttgtcctttaacgaggccttaccactcttttgttactctattgatccagctcagcaaaggcagtgtgatctaagattctatcttcgcgatgtagtaaaactagctagaccgagaaagagactagaaatgcaaaaggcacttctacaatggctgccatcattattatccgatgtgacgctgcagcttctcaatgatattcgaatacgctttgaggagatacagcctaatatccgacaaactgttttacagatttacgatcgtacttgttacccatcattgaattttgaacatccgaacctgggagttttccctgaaacagatagtatatttgaacctgtataataatatatagtctagcgctttacggaagacaatgtatgtatttcggttcctggagaaactattgcatctattgcataggtaatcttgcacgtcgcatccccggttcattttctgcgtttccatcttgcacttcaatagcatatctttgttaacgaagcatctgtgcttcattttgtagaacaaaaatgcaacgcgagagcgctaatttttcaaacaaagaatctgagctgcatttttacagaacagaaatgcaacgcgaaagcgctattttaccaacgaagaatctgtgcttcatttttgtaaaacaaaaatgcaacgcgacgagagcgctaatttttcaaacaaagaatctgagctgcatttttacagaacagaaatgcaacgcgagagcgctattttaccaacaaagaatctatacttcttttttgttctacaaaaatgcatcccgagagcgctatttttctaacaaagcatcttagattactttttttctcctttgtgcgctctataatgcagtctcttgataactttttgcactgtaggtccgttaaggttagaagaaggctactttggtgtctattttctcttccataaaaaaagcctgactccacttcccgcgtttactgattactagcgaagctgcgggtgcattttttcaagataaaggcatccccgattatattctataccgatgtggattgcgcatactttgtgaacagaaagtgatagcgttgatgattcttcattggtcagaaaattatgaacggtttcttctattttgtctctatatactacgtataggaaatgtttacattttcgtattgttttcgattcactctatgaatagttcttactacaatttttttgtctaaagagtaatactagagataaacataaaaaatgtagaggtcgagtttagatgcaagttcaaggagcgaaaggtggatgggtaggttatatagggatatagcacagagatatatagcaaagagatacttttgagcaatgtttgtggaagcggtattcgcaatgggaagctccaccccggttgataatcagaaaagccccaaaaacaggaagattgtataagcaaatatttaaattgtaaacgttaatattttgttaaaattcgcgttaaatttttgttaaatcagctcattttttaacgaatagcccgaaatcggcaaaatcccttataaatcaaaagaatagaccgagatagggttgagtgttgttccagtttccaacaagagtccactattaaagaacgtggactccaacgtcaaagggcgaaaaagggtctatcagggcgatggcccactacgtgaaccatcaccctaatcaagttttttggggtcgaggtgccgtaaagcagtaaatcggaagggtaaacggatgcccccatttagagcttgacggggaaagccggcgaacgtggcgagaaaggaagggaagaaagcgaaaggagcgggggctagggcggtgggaagtgtaggggtcacgctgggcgtaaccaccacacccgccgcgcttaatggggcgctacagggcgcgtggggatgatccactagtacggattagaagccgccgagcgggtgacagccctccgaaggaagactctcctccgtgcgtcctcgtcttcaccggtcgcgttcctgaaacgcagatgtgcctcgcgccgcactgctccgaacaataaagattctacaatactagcttttatggttatgaagaggaaaaattggcagtaacctggccccacaaaccttcaaatgaacgaatcaaattaacaaccataggatgataatgcgattagttttttagccttatttctggggtaattaatcagcgaagcgatgatttttgatctattaacagatatataaatgcaaaaactgcataaccactttaactaatactttcaacattttcggtttgtattacttcttattcaaatgtaataaaagtatcaacaaaaaattgttaatatacctctatactttaacgtcaaggagaaaaaaccccggatcggactactagcagctgtaatacgactcactatagggaatattaagcttaaacaatgttgttgggtgaagtttctggtgctactttggatccaactattactcatatggcctactacaagtccttgtcctctattaccgtttccgatattgaatcccatggtattgctagagaagatgctgctactttacatcaaggtttggccgaaattatcgaaacccattctaatggtactccagctacttggcaacatgtttccaattctattttgaacccagaattgccattcagcttccaccaaatgttgtattacggttgctacaaagattacggtccagatccaccagcttggattccaaatagagaatctgctgctttgactaacgtctggcaattattggaaagaaagggtgaagaattcttgggttctgcttacaaggatccaattacctcttttgacgacttccaaaagttctccgtttctaacccagaaatctactggaaatgtgtttgggacgaaatgtccatctcattttctaaaccaccagaatgcatcttgagagattctccatctggtgaatctccattgtctcatccatctggtcaatggttgccaggtgcttctattaacccagctcaaaattgcttgaacgtcaacggtaagagatctttgaacgataccgttatcatttggagagatgaacaacacgatgacttgccaagacaaagaatgactttggaagaattgagagaagaagtttggttggttgcttacgcattgcaatctttgggtttggaaaaaggttccgctattgctattgatatgccaatgaacgttaagtccgttgttatctacttggctatcgttttggcttcctacgttgttgtttctattgctgattctttcgccgcctctgaaatttctactagattgaagatttccaaggccaaggttatcttcacccaagatttgattatgaggggtgataagtccatcccattatactctagagttgttgatgctcaatctccaatggctgttgttattccagctaagggttctgaattctccatgaagttgagaaacggtgatttgtcctggcatgattttttggaaaaggtcaacaacttgaagggtaaagaattcattgctaccgaacagccaattgaaaccttcaccaatatcttgttctcttctggtactactggtgatccaaaagctattccatggactaacattactccattgaaagctgctgctgatgcttggtgtcatatggatgttagaaaaggtgatgttgtttgctggccaactaatttgggttggatgatgggtccttggttggtttatgcttctttgttgaatggtgcttctatggccttgtatattggttctccattgggttctggtttcgctaagtttgttcaagatgctaaggttaccatgttgggtgttattccatctatcgttagatcttggagatctaccaattctacctctggttatgattggtcctctattagatgtttcggttctactggtgaagcctctaatgttgatgaatacttgtggttgatgggtagagcattatacaagccaattatcgaatactgcggtggtactgaaattggtggtggttttgtttgtggttctttgttgcaagctcaatctttggctgctttttctactccagctatgtgttgctctttgttcatcttggatgatgaaggtttgccaatcccacaaaatgttccaggtattggtgaattggctttgggtccattgatgttgggtgcttctaatactttgttgaacgctgatcattacggcgtttactttaaaggtatgccattgctaaacggcaaggttttgagaaggcatggtgatgtttttgaaagaactgctaagggttactaccatgctcatggtagatctgatgataccatgaatttgggtggtatcaaggtttcctccgttgaaattgaaagaatctgcaacggtgttgactcctctattttggaaactgctgctattggtgttccaccatctggtggtggtccagaattattgactattgctgttgttttcaaggactccaattccaccaatcaagacttgcatcaattgagaatgtctttcaattccgccttgcagaagaagttgaatcctttgtttagagtctcccaagttgttaccttgccatctttgccaagaactgcttctaacaaggttatgagaagagtcttgagacagcagttgtccgaaactaatcaaaactccaagattctcgagcatgcatctagagggccgcatcatgtaattagttatgtcacgcttacattcacgccctccccccacatccgctctaaccgaaaaggaaggagttagacaacctgaagtctaggtccctatttatttttttatagttatgttagtattaagaacgttatttatatttcaaatttttcttttttttctgtacagacgcgtgtacgcatgtaacattatactgaaaaccttgcttgagaaggttttgggacgctcgaaggctttaatttgcggccctgcattaatgaatcggccaacgcgcggggagaggcggtttgcgtattgggcgctcttccgcttcctcgctcactgactcgctgcgctcggtcgttcggctgcggcgagcggtatcagctcactcaaaggcggtaatacggttatccacagaatcaggggataacgcaggaaagaacatgtgagcaaaaggccagcaaaagcccaggaaccgtaaaaaggccgcgttgctggcgtttttccataggctccgcccccctgacgagcatcacaaaaatcgacgctcaagtcagaggtggcgaaacccgacaggactataaagataccaggcgtttccccctggaagctccctcgtgcgctctcctgttccgaccctgccgcttaccggatacctgtccgcctttctcccttcgggaagcgtggcgctttctcatagctcacgctgtaggtatctcagttcggtgtaggtcgttcgctccaagctgggctgtgtgcacgaaccccccgttcagcccgaccgctgcgccttatccggtaactatcgtcttgagtccaacccggtaagacacgacttatcgccactggcagcagccactggtaacaggattagcagagcgaggtatgtaggcggtgctacagagttcttgaagtggtggcctaactacggctacactagaaggacagtatttggtatctgcgctctgctgaagccagttaccttcggaaaaagagttggtagctcttgatccggcaaacaaaccaccgctggtagcggtggtttttttgtttgcaagcagcagattacgcgcagaaaaaaaggatctcaagaagatcctttgatcttttctacggggtctgacgctcagtggaacgaaaactcacgttaagggattttggtcatgagattatcaaaaaggatcttcacctagatccttttaaattaaaaatgaagttttaaatcaatctaaagtatatatgagtaaacttggtctgacagttaccaatgcttaatcagtgaggcacctatctcagcgatctgtctatttcgttcatccatagttgcctgactccccgtcgtgtagataactacgatacgggagcgcttaccatctggccccagtgctgcaatgataccgcgagacccacgctcaccggctccagatttatcagcaataaaccagccagccggaagggccgagcgcagaagtggtcctgcaactttatccgcctccattcagtctattaattgttgccgggaagctagagtaagtagttcgccagttaatagtttgcgcaacgttgttggcattgctacaggcatcgtggtgtcactctcgtcgtttggtatggcttcattcagctccggttcccaacgatcaaggcgagttacatgatcccccatgttgtgcaaaaaagcggttagctccttcggtcctccgatcgttgtcagaagtaagttggccgcagtgttatcactcatggttatggcagcactgcataattctcttactgtcatgccatccgtaagatgcttttctgtgactggtgagtactcaaccaagtcattctgagaatagtgtatgcggcgaccgagttgctcttgcccggcgtcaatacgggataatagtgtatcacatagcagaactttaaaagtgctcatcattggaaaacgttcttcggggcgaaaactctcaaggatcttaccgctgttgagatccagttcgatgtaacccactcgtgcacccaactgatcttcagcatcttttactttcaccagcgtttctgggtgagcaaaaacaggaaggcaaaatgccgcaaaaaagggaataagggcgacacggaaatgttgaatactcatactcttcctttttcaatgggtaataactgatataattaaattgaagctctaatttgtgagtttagtatacatgcatttacttataatacagttttttagttttgctggccgcatcttctcaaatatgcttcccagcctgcttttctgtaacgttcaccctctaccttagcatcccttccctttgcaaatagtcctcttccaacaataataatgtcagatcctgtagagaccacatcatccacggttctatactgttgacccaatgcgtctcccttgtcatctaaacccacaccgggtgtcataatcaaccaatcgtaaccttcatctcttccacccatgtctctttgagcaataaagccgataacaaaatctttgtcgctcttcgcaatgtcaacagtacccttagtatattctccagtagatagggagcccttgcatgacaattctgctaacatcaaaaggcctctaggttcctttgttacttcttctgccgcctgcttcaaaccgctaacaatacctgggcccaccacaccgtgtgcattcgtaatgtctgcccattctgctattctgtatacacccgcagagtactgcaatttgactgtattaccaatgtcagcaaattttctgtcttcg

SEQ ID NO: 353 - DNA, 7030 bp, Artificial Sequence
  PLAS452
aagagtaaaaaattgtacttggcggataatgcctttagcggcttaactgtgccctccatggaaaaatcagtcaagatatccacatgtgtttttagtaaacaaattttgggacctaatgcttcaactaactccagtaattccttggtggtacgaacatccaatgaagcacacaagtttgtttgcttttcgtgcatgatattaaatagcttggcagcaacaggactaggatgagtagcagcacgttccttatatgtagctttcgacatgatttatcttcgtttcctgcaggtttttgttctgtgcagttgggttaagaatactgggcaatttcatgtttcttcaacactacatatgcgtatatataccaatctaagtctgtgctccttccttcgttcttccttctgttcggagattaccgaatcaaaaaaatttcaaagaaaccgaaatcaaaaaaaagaataaaaaaaaaatgatgaattgaattgaaaagctagcttatcgatgataagctgtcaaagatgagaattaattccacggactatagactatactagatactccgtctactgtacgatacacttccgctcaggtccttgtcctttaacgaggccttaccactcttttgttactctattgatccagctcagcaaaggcagtgtgatctaagattctatcttcgcgatgtagtaaaactagctagaccgagaaagagactagaaatgcaaaaggcacttctacaatggctgccatcattattatccgatgtgacgctgcagcttctcaatgatattcgaatacgctttgaggagatacagcctaatatccgacaaactgttttacagatttacgatcgtacttgttacccatcattgaattttgaacatccgaacctgggagttttccctgaaacagatagtatatttgaacctgtataataatatatagtctagcgctttacggaagacaatgtatgtatttcggttcctggagaaactattgcatctattgcataggtaatcttgcacgtcgcatccccggttcattttctgcgtttccatcttgcacttcaatagcatatctttgttaacgaagcatctgtgcttcattttgtagaacaaaaatgcaacgcgagagcgctaatttttcaaacaaagaatctgagctgcatttttacagaacagaaatgcaacgcgaaagcgctattttaccaacgaagaatctgtgcttcatttttgtaaaacaaaaatgcaacgcgacgagagcgctaatttttcaaacaaagaatctgagctgcatttttacagaacagaaatgcaacgcgagagcgctattttaccaacaaagaatctatacttcttttttgttctacaaaaatgcatcccgagagcgctatttttctaacaaagcatcttagattactttttttctcctttgtgcgctctataatgcagtctcttgataactttttgcactgtaggtccgttaaggttagaagaaggctactttggtgtctattttctcttccataaaaaaagcctgactccacttcccgcgtttactgattactagcgaagctgcgggtgcattttttcaagataaaggcatccccgattatattctataccgatgtggattgcgcatactttgtgaacagaaagtgatagcgttgatgattcttcattggtcagaaaattatgaacggtttcttctattttgtctctatatactacgtataggaaatgtttacattttcgtattgttttcgattcactctatgaatagttcttactacaatttttttgtctaaagagtaatactagagataaacataaaaaatgtagaggtcgagtttagatgcaagttcaaggagcgaaaggtggatgggtaggttatatagggatatagcacagagatatatagcaaagagatacttttgagcaatgtttgtggaagcggtattcgcaatgggaagctccaccccggttgataatcagaaaagccccaaaaacaggaagattgtataagcaaatatttaaattgtaaacgttaatattttgttaaaattcgcgttaaatttttgttaaatcagctcattttttaacgaatagcccgaaatcggcaaaatcccttataaatcaaaagaatagaccgagatagggttgagtgttgttccagtttccaacaagagtccactattaaagaacgtggactccaacgtcaaagggcgaaaaagggtctatcagggcgatggcccactacgtgaaccatcaccctaatcaagttttttggggtcgaggtgccgtaaagcagtaaatcggaagggtaaacggatgcccccatttagagcttgacggggaaagccggcgaacgtggcgagaaaggaagggaagaaagcgaaaggagcgggggctagggcggtgggaagtgtaggggtcacgctgggcgtaaccaccacacccgccgcgcttaatggggcgctacagggcgcgtggggatgatccactagtacggattagaagccgccgagcgggtgacagccctccgaaggaagactctcctccgtgcgtcctcgtcttcaccggtcgcgttcctgaaacgcagatgtgcctcgcgccgcactgctccgaacaataaagattctacaatactagcttttatggttatgaagaggaaaaattggcagtaacctggccccacaaaccttcaaatgaacgaatcaaattaacaaccataggatgataatgcgattagttttttagccttatttctggggtaattaatcagcgaagcgatgatttttgatctattaacagatatataaatgcaaaaactgcataaccactttaactaatactttcaacattttcggtttgtattacttcttattcaaatgtaataaaagtatcaacaaaaaattgttaatatacctctatactttaacgtcaaggagaaaaaaccccggatcggactactagcagctgtaatacgactcactatagggaatattaagcttaaacaatggccatcgttattccaaacagatcttccaccttgtccatcgaattgagagatggtgatatttcctggcaagacttcttggaaagagtcgacaaatctaaagaagttgagtacatcggagttgaattgccagttgaagctagcaccaatatcttgttttcttctggtactactggtgaacctaaagctattccatggactgctactactccattgagagctgctgctgatggttggtctttgaatattggtaaggatgatgttgttgcctggccaactaatttgggttggatgatgggtccatggttgatctattctactttgttgaatggtgctaccatggccttgtataatggttctccattgggtgctggttttgctaagtttgttcaagatgctaaggttaccatgttgggtgttgttccatctatagttagagcttggaaatctaccaactgtactgctggttatgattggtcctctatttgtcattttgcttctactggtgaagcctctggtgttgatgaatctttgtggttgatgggtagagcacagtacaagccaattattgaaatttgcggtggtactgaaattggtggtggttttattgctggttctttgttgcaaccacaatccttgtctgctttttctactgctgctatgggttgctccttgtttattttgggtgaagatggttctccaagaccatttgattctccaggtattggtgaattggctttgggtcctttgttgtttggtgcttcttctactttattgaacgccgatcattacggtgtttactatactggtatgccagtttggaatggtaaggttttgagaaggcatggtgatgttttcgaaagaacttctagaggttactacagagcacatggtagagctgatgatacaatgaatttgggtggtgtcaaggtttcctccgttgaaattgaaaaagtctgcaacgcagttgacgaatccattttggaaactgctgctgttggtgttccacctccaggtggtggtccagataagttggttattgctgttgttttcaaggactccaagggttctaaggataacttgaactctttgaaggtttccttgaattccgccttgcaaaagaagttgaatcctttgttcaaggtgtcccatatcgttgtcttgcattctttgccaagaactgctaccaacaaggttatgagaagagtcttgagacaacaattctcccaagttggttctaaattgctcgagcatgcatctagagggccgcatcatgtaattagttatgtcacgcttacattcacgccctccccccacatccgctctaaccgaaaaggaaggagttagacaacctgaagtctaggtccctatttatttttttatagttatgttagtattaagaacgttatttatatttcaaatttttcttttttttctgtacagacgcgtgtacgcatgtaacattatactgaaaaccttgcttgagaaggttttgggacgctcgaaggctttaatttgcggccctgcattaatgaatcggccaacgcgcggggagaggcggtttgcgtattgggcgctcttccgcttcctcgctcactgactcgctgcgctcggtcgttcggctgcggcgagcggtatcagctcactcaaaggcggtaatacggttatccacagaatcaggggataacgcaggaaagaacatgtgagcaaaaggccagcaaaagcccaggaaccgtaaaaaggccgcgttgctggcgtttttccataggctccgcccccctgacgagcatcacaaaaatcgacgctcaagtcagaggtggcgaaacccgacaggactataaagataccaggcgtttccccctggaagctccctcgtgcgctctcctgttccgaccctgccgcttaccggatacctgtccgcctttctcccttcgggaagcgtggcgctttctcatagctcacgctgtaggtatctcagttcggtgtaggtcgttcgctccaagctgggctgtgtgcacgaaccccccgttcagcccgaccgctgcgccttatccggtaactatcgtcttgagtccaacccggtaagacacgacttatcgccactggcagcagccactggtaacaggattagcagagcgaggtatgtaggcggtgctacagagttcttgaagtggtggcctaactacggctacactagaaggacagtatttggtatctgcgctctgctgaagccagttaccttcggaaaaagagttggtagctcttgatccggcaaacaaaccaccgctggtagcggtggtttttttgtttgcaagcagcagattacgcgcagaaaaaaaggatctcaagaagatcctttgatcttttctacggggtctgacgctcagtggaacgaaaactcacgttaagggattttggtcatgagattatcaaaaaggatcttcacctagatccttttaaattaaaaatgaagttttaaatcaatctaaagtatatatgagtaaacttggtctgacagttaccaatgcttaatcagtgaggcacctatctcagcgatctgtctatttcgttcatccatagttgcctgactccccgtcgtgtagataactacgatacgggagcgcttaccatctggccccagtgctgcaatgataccgcgagacccacgctcaccggctccagatttatcagcaataaaccagccagccggaagggccgagcgcagaagtggtcctgcaactttatccgcctccattcagtctattaattgttgccgggaagctagagtaagtagttcgccagttaatagtttgcgcaacgttgttggcattgctacaggcatcgtggtgtcactctcgtcgtttggtatggcttcattcagctccggttcccaacgatcaaggcgagttacatgatcccccatgttgtgcaaaaaagcggttagctccttcggtcctccgatcgttgtcagaagtaagttggccgcagtgttatcactcatggttatggcagcactgcataattctcttactgtcatgccatccgtaagatgcttttctgtgactggtgagtactcaaccaagtcattctgagaatagtgtatgcggcgaccgagttgctcttgcccggcgtcaatacgggataatagtgtatcacatagcagaactttaaaagtgctcatcattggaaaacgttcttcggggcgaaaactctcaaggatcttaccgctgttgagatccagttcgatgtaacccactcgtgcacccaactgatcttcagcatcttttactttcaccagcgtttctgggtgagcaaaaacaggaaggcaaaatgccgcaaaaaagggaataagggcgacacggaaatgttgaatactcatactcttcctttttcaatgggtaataactgatataattaaattgaagctctaatttgtgagtttagtatacatgcatttacttataatacagttttttagttttgctggccgcatcttctcaaatatgcttcccagcctgcttttctgtaacgttcaccctctaccttagcatcccttccctttgcaaatagtcctcttccaacaataataatgtcagatcctgtagagaccacatcatccacggttctatactgttgacccaatgcgtctcccttgtcatctaaacccacaccgggtgtcataatcaaccaatcgtaaccttcatctcttccacccatgtctctttgagcaataaagccgataacaaaatctttgtcgctcttcgcaatgtcaacagtacccttagtatattctccagtagatagggagcccttgcatgacaattctgctaacatcaaaaggcctctaggttcctttgttacttcttctgccgcctgcttcaaaccgctaacaatacctgggcccaccacaccgtgtgcattcgtaatgtctgcccattctgctattctgtatacacccgcagagtactgcaatttgactgtattaccaatgtcagcaaattttctgtcttcg

SEQ ID NO: 354 - DNA, 7948 bp, Artificial Sequence
  PLAS453
aagagtaaaaaattgtacttggcggataatgcctttagcggcttaactgtgccctccatggaaaaatcagtcaagatatccacatgtgtttttagtaaacaaattttgggacctaatgcttcaactaactccagtaattccttggtggtacgaacatccaatgaagcacacaagtttgtttgcttttcgtgcatgatattaaatagcttggcagcaacaggactaggatgagtagcagcacgttccttatatgtagctttcgacatgatttatcttcgtttcctgcaggtttttgttctgtgcagttgggttaagaatactgggcaatttcatgtttcttcaacactacatatgcgtatatataccaatctaagtctgtgctccttccttcgttcttccttctgttcggagattaccgaatcaaaaaaatttcaaagaaaccgaaatcaaaaaaaagaataaaaaaaaaatgatgaattgaattgaaaagctagcttatcgatgataagctgtcaaagatgagaattaattccacggactatagactatactagatactccgtctactgtacgatacacttccgctcaggtccttgtcctttaacgaggccttaccactcttttgttactctattgatccagctcagcaaaggcagtgtgatctaagattctatcttcgcgatgtagtaaaactagctagaccgagaaagagactagaaatgcaaaaggcacttctacaatggctgccatcattattatccgatgtgacgctgcagcttctcaatgatattcgaatacgctttgaggagatacagcctaatatccgacaaactgttttacagatttacgatcgtacttgttacccatcattgaattttgaacatccgaacctgggagttttccctgaaacagatagtatatttgaacctgtataataatatatagtctagcgctttacggaagacaatgtatgtatttcggttcctggagaaactattgcatctattgcataggtaatcttgcacgtcgcatccccggttcattttctgcgtttccatcttgcacttcaatagcatatctttgttaacgaagcatctgtgcttcattttgtagaacaaaaatgcaacgcgagagcgctaatttttcaaacaaagaatctgagctgcatttttacagaacagaaatgcaacgcgaaagcgctattttaccaacgaagaatctgtgcttcatttttgtaaaacaaaaatgcaacgcgacgagagcgctaatttttcaaacaaagaatctgagctgcatttttacagaacagaaatgcaacgcgagagcgctattttaccaacaaagaatctatacttcttttttgttctacaaaaatgcatcccgagagcgctatttttctaacaaagcatcttagattactttttttctcctttgtgcgctctataatgcagtctcttgataactttttgcactgtaggtccgttaaggttagaagaaggctactttggtgtctattttctcttccataaaaaaagcctgactccacttcccgcgtttactgattactagcgaagctgcgggtgcattttttcaagataaaggcatccccgattatattctataccgatgtggattgcgcatactttgtgaacagaaagtgatagcgttgatgattcttcattggtcagaaaattatgaacggtttcttctattttgtctctatatactacgtataggaaatgtttacattttcgtattgttttcgattcactctatgaatagttcttactacaatttttttgtctaaagagtaatactagagataaacataaaaaatgtagaggtcgagtttagatgcaagttcaaggagcgaaaggtggatgggtaggttatatagggatatagcacagagatatatagcaaagagatacttttgagcaatgtttgtggaagcggtattcgcaatgggaagctccaccccggttgataatcagaaaagccccaaaaacaggaagattgtataagcaaatatttaaattgtaaacgttaatattttgttaaaattcgcgttaaatttttgttaaatcagctcattttttaacgaatagcccgaaatcggcaaaatcccttataaatcaaaagaatagaccgagatagggttgagtgttgttccagtttccaacaagagtccactattaaagaacgtggactccaacgtcaaagggcgaaaaagggtctatcagggcgatggcccactacgtgaaccatcaccctaatcaagttttttggggtcgaggtgccgtaaagcagtaaatcggaagggtaaacggatgcccccatttagagcttgacggggaaagccggcgaacgtggcgagaaaggaagggaagaaagcgaaaggagcgggggctagggcggtgggaagtgtaggggtcacgctgggcgtaaccaccacacccgccgcgcttaatggggcgctacagggcgcgtggggatgatccactagtacggattagaagccgccgagcgggtgacagccctccgaaggaagactctcctccgtgcgtcctcgtcttcaccggtcgcgttcctgaaacgcagatgtgcctcgcgccgcactgctccgaacaataaagattctacaatactagcttttatggttatgaagaggaaaaattggcagtaacctggccccacaaaccttcaaatgaacgaatcaaattaacaaccataggatgataatgcgattagttttttagccttatttctggggtaattaatcagcgaagcgatgatttttgatctattaacagatatataaatgcaaaaactgcataaccactttaactaatactttcaacattttcggtttgtattacttcttattcaaatgtaataaaagtatcaacaaaaaattgttaatatacctctatactttaacgtcaaggagaaaaaaccccggatcggactactagcagctgtaatacgactcactatagggaatattaagcttaaacaatggcctacaagtccttgaactctattaccaagtctgatattgaagccttgggtatctctggtgatgtttctgaaaagttgttgagggacttggaagatatcatccatggttcttctactccaccagaaacctggattcaaatctctagaagaatcttgcatccaaacttgccattctctttccaccaaatgatgtactacggttgctacaaagatttcggtccagatttgccagcttggattccagatccaaaagttgcttctttgactaacgtcggtaagttgttggaaaagaggggtaaagaatttttgggtggcaattacaagaacccagtctcttcattttccagcttccaagaattctctgtctctaacccagaagtttactggaaaaccgttttggacgaattgaacatcttgttctcagttccaccaaagtgcattttggaaaaagatacctctggtgataatccaggtggtaaatggttgccaggtgcttacttgaatccagctagaaactgtttgactaacggtttcaagagaagattggatgatatcgttatcaggtggagagatgaaggttctgatgatttgccagttaacactatgaccttgttggaattgagatcccaagtttggttggctgctcatgctttgtctgctttgggtttggaagaagaatctgctattgctgttgatatgccaatgaacgttgaatccgttattatctacttggctatcgttttggctggtcacgttgttgtttctattgctgattcattctccccaagagaaatctctaccagattgaagatttctaaggccaaggctattttcacccaagatgttattatcaggggtgacaagtccatcccactatacagaagagttgttgatgctgaagctccattggctatagttgttccagctagaggttcttcttgtagaatgaagttgagagagaaggacttgtcttggaacaattttttgggtaacgccagaaacttgagaggtgttgaatatgttgctgctgaaaaaccagctggtgcttacaccaatattttgttctcttctggtactaccggtgaacctaaagctattccatggactaatatctccccattgaaatctgctgctgatgcttggtgtcatttggatgttcaaagaggtgacgttgttgcttggccaactaatttgggttggatgatgggtccttggttggtttatgcttctttgatcaatggtgcttgtatgggcttgtataatggttctccattgggtccaactttcgctaagtttgttcaagatgctgaagtttccgttttgggtgttattccatctatcgttagaacctggcaaaactctaattctacctctggttatgactggtccagaattagatgtttcggttctactggtgaagcctccaatattgatgaatacttgtggttgatgggtagagcccattacaaaccagttattgaatattgcggtggcactgaaattggtggttcttttatttctggttccttgttgcaaccacaatctttggctgctttttctactgctgctatgggttgtaagttgttcatcttggacgaagattctaacccaattccaccatatgctgctggtgttggtgaattggctttgtgtccacatatgtttggtgcttcatctactttgttgaacggtaaccatttcaaggtctactttcaaggtatgccaactttccaaggtcagattttgagaaggcatggtgatttgttcgaaagaacttctaaaggttactacagagcacatggtagagctgatgatacaatgaatttgggtggtatcaaggtcggttccattgaaattgaaagagtctgcaactccgttgatgattctgttttggaaactgctgctattggtgttccaccaccatctggtggtccagaacaattggttattgctgttgttttcaagtccccagaattttccaacccagacttgaatttgttgaagaagtccttcaactccgagatccaaaagaagttgaatcctttgttcaaggtgtcctctgttgttactttgccatctttgccaagaactgctaccaacaaagttatgagaagagtcttgagacaacaattgacccaaactggtttgaactccaagttgctcgagcatgcatctagagggccgcatcatgtaattagttatgtcacgcttacattcacgccctccccccacatccgctctaaccgaaaaggaaggagttagacaacctgaagtctaggtccctatttatttttttatagttatgttagtattaagaacgttatttatatttcaaatttttcttttttttctgtacagacgcgtgtacgcatgtaacattatactgaaaaccttgcttgagaaggttttgggacgctcgaaggctttaatttgcggccctgcattaatgaatcggccaacgcgcggggagaggcggtttgcgtattgggcgctcttccgcttcctcgctcactgactcgctgcgctcggtcgttcggctgcggcgagcggtatcagctcactcaaaggcggtaatacggttatccacagaatcaggggataacgcaggaaagaacatgtgagcaaaaggccagcaaaagcccaggaaccgtaaaaaggccgcgttgctggcgtttttccataggctccgcccccctgacgagcatcacaaaaatcgacgctcaagtcagaggtggcgaaacccgacaggactataaagataccaggcgtttccccctggaagctccctcgtgcgctctcctgttccgaccctgccgcttaccggatacctgtccgcctttctcccttcgggaagcgtggcgctttctcatagctcacgctgtaggtatctcagttcggtgtaggtcgttcgctccaagctgggctgtgtgcacgaaccccccgttcagcccgaccgctgcgccttatccggtaactatcgtcttgagtccaacccggtaagacacgacttatcgccactggcagcagccactggtaacaggattagcagagcgaggtatgtaggcggtgctacagagttcttgaagtggtggcctaactacggctacactagaaggacagtatttggtatctgcgctctgctgaagccagttaccttcggaaaaagagttggtagctcttgatccggcaaacaaaccaccgctggtagcggtggtttttttgtttgcaagcagcagattacgcgcagaaaaaaaggatctcaagaagatcctttgatcttttctacggggtctgacgctcagtggaacgaaaactcacgttaagggattttggtcatgagattatcaaaaaggatcttcacctagatccttttaaattaaaaatgaagttttaaatcaatctaaagtatatatgagtaaacttggtctgacagttaccaatgcttaatcagtgaggcacctatctcagcgatctgtctatttcgttcatccatagttgcctgactccccgtcgtgtagataactacgatacgggagcgcttaccatctggccccagtgctgcaatgataccgcgagacccacgctcaccggctccagatttatcagcaataaaccagccagccggaagggccgagcgcagaagtggtcctgcaactttatccgcctccattcagtctattaattgttgccgggaagctagagtaagtagttcgccagttaatagtttgcgcaacgttgttggcattgctacaggcatcgtggtgtcactctcgtcgtttggtatggcttcattcagctccggttcccaacgatcaaggcgagttacatgatcccccatgttgtgcaaaaaagcggttagctccttcggtcctccgatcgttgtcagaagtaagttggccgcagtgttatcactcatggttatggcagcactgcataattctcttactgtcatgccatccgtaagatgcttttctgtgactggtgagtactcaaccaagtcattctgagaatagtgtatgcggcgaccgagttgctcttgcccggcgtcaatacgggataatagtgtatcacatagcagaactttaaaagtgctcatcattggaaaacgttcttcggggcgaaaactctcaaggatcttaccgctgttgagatccagttcgatgtaacccactcgtgcacccaactgatcttcagcatcttttactttcaccagcgtttctgggtgagcaaaaacaggaaggcaaaatgccgcaaaaaagggaataagggcgacacggaaatgttgaatactcatactcttcctttttcaatgggtaataactgatataattaaattgaagctctaatttgtgagtttagtatacatgcatttacttataatacagttttttagttttgctggccgcatcttctcaaatatgcttcccagcctgcttttctgtaacgttcaccctctaccttagcatcccttccctttgcaaatagtcctcttccaacaataataatgtcagatcctgtagagaccacatcatccacggttctatactgttgacccaatgcgtctcccttgtcatctaaacccacaccgggtgtcataatcaaccaatcgtaaccttcatctcttccacccatgtctctttgagcaataaagccgataacaaaatctttgtcgctcttcgcaatgtcaacagtacccttagtatattctccagtagatagggagcccttgcatgacaattctgctaacatcaaaaggcctctaggttcctttgttacttcttctgccgcctgcttcaaaccgctaacaatacctgggcccaccacaccgtgtgcattcgtaatgtctgcccattctgctattctgtatacacccgcagagtactgcaatttgactgtattaccaatgtcagcaaattttctgtcttcg

SEQ ID NO: 355 - DNA, 7966 bp, Artificial Sequence
  PLAS454
aagagtaaaaaattgtacttggcggataatgcctttagcggcttaactgtgccctccatggaaaaatcagtcaagatatccacatgtgtttttagtaaacaaattttgggacctaatgcttcaactaactccagtaattccttggtggtacgaacatccaatgaagcacacaagtttgtttgcttttcgtgcatgatattaaatagcttggcagcaacaggactaggatgagtagcagcacgttccttatatgtagctttcgacatgatttatcttcgtttcctgcaggtttttgttctgtgcagttgggttaagaatactgggcaatttcatgtttcttcaacactacatatgcgtatatataccaatctaagtctgtgctccttccttcgttcttccttctgttcggagattaccgaatcaaaaaaatttcaaagaaaccgaaatcaaaaaaaagaataaaaaaaaaatgatgaattgaattgaaaagctagcttatcgatgataagctgtcaaagatgagaattaattccacggactatagactatactagatactccgtctactgtacgatacacttccgctcaggtccttgtcctttaacgaggccttaccactcttttgttactctattgatccagctcagcaaaggcagtgtgatctaagattctatcttcgcgatgtagtaaaactagctagaccgagaaagagactagaaatgcaaaaggcacttctacaatggctgccatcattattatccgatgtgacgctgcagcttctcaatgatattcgaatacgctttgaggagatacagcctaatatccgacaaactgttttacagatttacgatcgtacttgttacccatcattgaattttgaacatccgaacctgggagttttccctgaaacagatagtatatttgaacctgtataataatatatagtctagcgctttacggaagacaatgtatgtatttcggttcctggagaaactattgcatctattgcataggtaatcttgcacgtcgcatccccggttcattttctgcgtttccatcttgcacttcaatagcatatctttgttaacgaagcatctgtgcttcattttgtagaacaaaaatgcaacgcgagagcgctaatttttcaaacaaagaatctgagctgcatttttacagaacagaaatgcaacgcgaaagcgctattttaccaacgaagaatctgtgcttcatttttgtaaaacaaaaatgcaacgcgacgagagcgctaatttttcaaacaaagaatctgagctgcatttttacagaacagaaatgcaacgcgagagcgctattttaccaacaaagaatctatacttcttttttgttctacaaaaatgcatcccgagagcgctatttttctaacaaagcatcttagattactttttttctcctttgtgcgctctataatgcagtctcttgataactttttgcactgtaggtccgttaaggttagaagaaggctactttggtgtctattttctcttccataaaaaaagcctgactccacttcccgcgtttactgattactagcgaagctgcgggtgcattttttcaagataaaggcatccccgattatattctataccgatgtggattgcgcatactttgtgaacagaaagtgatagcgttgatgattcttcattggtcagaaaattatgaacggtttcttctattttgtctctatatactacgtataggaaatgtttacattttcgtattgttttcgattcactctatgaatagttcttactacaatttttttgtctaaagagtaatactagagataaacataaaaaatgtagaggtcgagtttagatgcaagttcaaggagcgaaaggtggatgggtaggttatatagggatatagcacagagatatatagcaaagagatacttttgagcaatgtttgtggaagcggtattcgcaatgggaagctccaccccggttgataatcagaaaagccccaaaaacaggaagattgtataagcaaatatttaaattgtaaacgttaatattttgttaaaattcgcgttaaatttttgttaaatcagctcattttttaacgaatagcccgaaatcggcaaaatcccttataaatcaaaagaatagaccgagatagggttgagtgttgttccagtttccaacaagagtccactattaaagaacgtggactccaacgtcaaagggcgaaaaagggtctatcagggcgatggcccactacgtgaaccatcaccctaatcaagttttttggggtcgaggtgccgtaaagcagtaaatcggaagggtaaacggatgcccccatttagagcttgacggggaaagccggcgaacgtggcgagaaaggaagggaagaaagcgaaaggagcgggggctagggcggtgggaagtgtaggggtcacgctgggcgtaaccaccacacccgccgcgcttaatggggcgctacagggcgcgtggggatgatccactagtacggattagaagccgccgagcgggtgacagccctccgaaggaagactctcctccgtgcgtcctcgtcttcaccggtcgcgttcctgaaacgcagatgtgcctcgcgccgcactgctccgaacaataaagattctacaatactagcttttatggttatgaagaggaaaaattggcagtaacctggccccacaaaccttcaaatgaacgaatcaaattaacaaccataggatgataatgcgattagttttttagccttatttctggggtaattaatcagcgaagcgatgatttttgatctattaacagatatataaatgcaaaaactgcataaccactttaactaatactttcaacattttcggtttgtattacttcttattcaaatgtaataaaagtatcaacaaaaaattgttaatatacctctatactttaacgtcaaggagaaaaaaccccggatcggactactagcagctgtaatacgactcactatagggaatattaagcttaaacaatggaagaaccatccatcgaagaattggttgatgctggtttgggtcatgaagaagctagatcttttcactggaagttgaaccagtctttgagagcttctggtgaatctccatcttctatttggagatccttgtccaagaatgttttggctccatctcatccattcagattgcatcagttgttgtaccattcttgctacaagaattgggattctgctagattgggtccaccaccagtttggattccatctttggctcaagctaagtctactaatttgggtagaactatggacacctacggtagagatttgtttggttgttctttcttcgatccaattaccaacttcgccgaattccaaagattctctgttgaaaacccagacgtctattggagaattgtcttgcaagaattggaaatcccattcgtcgaacaaccatccagaattttggatatggaaagaaacgaaatcgacggtgaaccatgtccaggtggtcaatggttgtgtgaagctactttgaatgctgctgaatgttgcttccaagaatctagatgtagaaaggctttcaacaccgctattctttggagagatgaaggtaatgataccggcttgaattctttgaccttgtccgaattgagatcccaatcatgtagagttgccaactcattggaaagattgggtttttcttctggtgatgctgttgctattaacatgccaatgactccagtttccgttgttgtttatttgggtatcgttttgtgtggttgcgttgttgtttctattgccgattctttctcctcctctgaaattgaaaccaggttgaacatttctaaggccaaggctattttcacccaagatgttatagttagaggtggtaaagatttggccttgtacactagagttgttgatgctaatgctccaagagcttttgttattccaggtaaagctggtgctttgaccgttgaattgagatctaatgatatgtcctgggatgaattcttggctgtttctactggtttggctagaccacaagagtacaaaggtgttgctcaatctggtgaagccttctccaatattttgttctcttctggtactaccggtgatccaaaagctattccatggactcatttgactccaatcaaagctgctgctgatggttgggctcatcaagatattagatctagagatgttgtctcctggccaacaaatttgggttggatgatgggtccatggttggtttatgctactttggttaatggtgctaccattgccttgtataatggttctccattgggtagaggtttcgctaagtttgttcaagatgctaaggttaccatgttgggtgttgttccatctatagttagacattggaaaaccaccaagtgcttggatgatatcgatttgtcccatatcagaagggaacatccatctgatttgtgttctactggtgaagctagtaccgttgatgattatttgtggttgatgtccaaggcttcttacaagccagttattgaatattgcggtggtactgaaattggtggtggttttgttactggttctttgttgcaaccacaagccttggcttcattttctactccagctatgggttgtgatgttttcattttggatgaagccggtattccattgccatctgaaatgccaggtattggtgaatgtgctttggattcttctatgttgggtgcctctagaattttgttgaacgctaaccatttcaacatctacttcaagggtatgccaaagcacaatggtaaaactttgagaaggcatggtgacgaatttgaaagaactccaggtggtttttacaaggctcatggtagagttgatgataccatgaatttgggtggtatcaaggtttcctccgttgaaatagaaagaatctgtaacgctgccgatcaaagagttttggaaactgctgctattggtgtttctccaacaggtggtggtccagaaaaattgtgtgttattgctgttttgaaggccgaagttactgataagaccgatatctcttctgagttgaagttgagattcaacgctgccattcaaagaaagttgaaccctttgttcaaggccattgaaattgctggttctttgccaagaactgcctctaacaaagttatgagaagaaccttgagatcccagtctactaagagaacttctttgttgctcgagcatgcatctagagggccgcatcatgtaattagttatgtcacgcttacattcacgccctccccccacatccgctctaaccgaaaaggaaggagttagacaacctgaagtctaggtccctatttatttttttatagttatgttagtattaagaacgttatttatatttcaaatttttcttttttttctgtacagacgcgtgtacgcatgtaacattatactgaaaaccttgcttgagaaggttttgggacgctcgaaggctttaatttgcggccctgcattaatgaatcggccaacgcgcggggagaggcggtttgcgtattgggcgctcttccgcttcctcgctcactgactcgctgcgctcggtcgttcggctgcggcgagcggtatcagctcactcaaaggcggtaatacggttatccacagaatcaggggataacgcaggaaagaacatgtgagcaaaaggccagcaaaagcccaggaaccgtaaaaaggccgcgttgctggcgtttttccataggctccgcccccctgacgagcatcacaaaaatcgacgctcaagtcagaggtggcgaaacccgacaggactataaagataccaggcgtttccccctggaagctccctcgtgcgctctcctgttccgaccctgccgcttaccggatacctgtccgcctttctcccttcgggaagcgtggcgctttctcatagctcacgctgtaggtatctcagttcggtgtaggtcgttcgctccaagctgggctgtgtgcacgaaccccccgttcagcccgaccgctgcgccttatccggtaactatcgtcttgagtccaacccggtaagacacgacttatcgccactggcagcagccactggtaacaggattagcagagcgaggtatgtaggcggtgctacagagttcttgaagtggtggcctaactacggctacactagaaggacagtatttggtatctgcgctctgctgaagccagttaccttcggaaaaagagttggtagctcttgatccggcaaacaaaccaccgctggtagcggtggtttttttgtttgcaagcagcagattacgcgcagaaaaaaaggatctcaagaagatcctttgatcttttctacggggtctgacgctcagtggaacgaaaactcacgttaagggattttggtcatgagattatcaaaaaggatcttcacctagatccttttaaattaaaaatgaagttttaaatcaatctaaagtatatatgagtaaacttggtctgacagttaccaatgcttaatcagtgaggcacctatctcagcgatctgtctatttcgttcatccatagttgcctgactccccgtcgtgtagataactacgatacgggagcgcttaccatctggccccagtgctgcaatgataccgcgagacccacgctcaccggctccagatttatcagcaataaaccagccagccggaagggccgagcgcagaagtggtcctgcaactttatccgcctccattcagtctattaattgttgccgggaagctagagtaagtagttcgccagttaatagtttgcgcaacgttgttggcattgctacaggcatcgtggtgtcactctcgtcgtttggtatggcttcattcagctccggttcccaacgatcaaggcgagttacatgatcccccatgttgtgcaaaaaagcggttagctccttcggtcctccgatcgttgtcagaagtaagttggccgcagtgttatcactcatggttatggcagcactgcataattctcttactgtcatgccatccgtaagatgcttttctgtgactggtgagtactcaaccaagtcattctgagaatagtgtatgcggcgaccgagttgctcttgcccggcgtcaatacgggataatagtgtatcacatagcagaactttaaaagtgctcatcattggaaaacgttcttcggggcgaaaactctcaaggatcttaccgctgttgagatccagttcgatgtaacccactcgtgcacccaactgatcttcagcatcttttactttcaccagcgtttctgggtgagcaaaaacaggaaggcaaaatgccgcaaaaaagggaataagggcgacacggaaatgttgaatactcatactcttcctttttcaatgggtaataactgatataattaaattgaagctctaatttgtgagtttagtatacatgcatttacttataatacagttttttagttttgctggccgcatcttctcaaatatgcttcccagcctgcttttctgtaacgttcaccctctaccttagcatcccttccctttgcaaatagtcctcttccaacaataataatgtcagatcctgtagagaccacatcatccacggttctatactgttgacccaatgcgtctcccttgtcatctaaacccacaccgggtgtcataatcaaccaatcgtaaccttcatctcttccacccatgtctctttgagcaataaagccgataacaaaatctttgtcgctcttcgcaatgtcaacagtacccttagtatattctccagtagatagggagcccttgcatgacaattctgctaacatcaaaaggcctctaggttcctttgttacttcttctgccgcctgcttcaaaccgctaacaatacctgggcccaccacaccgtgtgcattcgtaatgtctgcccattctgctattctgtatacacccgcagagtactgcaatttgactgtattaccaatgtcagcaaattttctgtcttcg

SEQ ID NO: 356 - DNA, 7972 bp, Artificial Sequence
  PLAS455
aagagtaaaaaattgtacttggcggataatgcctttagcggcttaactgtgccctccatggaaaaatcagtcaagatatccacatgtgtttttagtaaacaaattttgggacctaatgcttcaactaactccagtaattccttggtggtacgaacatccaatgaagcacacaagtttgtttgcttttcgtgcatgatattaaatagcttggcagcaacaggactaggatgagtagcagcacgttccttatatgtagctttcgacatgatttatcttcgtttcctgcaggtttttgttctgtgcagttgggttaagaatactgggcaatttcatgtttcttcaacactacatatgcgtatatataccaatctaagtctgtgctccttccttcgttcttccttctgttcggagattaccgaatcaaaaaaatttcaaagaaaccgaaatcaaaaaaaagaataaaaaaaaaatgatgaattgaattgaaaagctagcttatcgatgataagctgtcaaagatgagaattaattccacggactatagactatactagatactccgtctactgtacgatacacttccgctcaggtccttgtcctttaacgaggccttaccactcttttgttactctattgatccagctcagcaaaggcagtgtgatctaagattctatcttcgcgatgtagtaaaactagctagaccgagaaagagactagaaatgcaaaaggcacttctacaatggctgccatcattattatccgatgtgacgctgcagcttctcaatgatattcgaatacgctttgaggagatacagcctaatatccgacaaactgttttacagatttacgatcgtacttgttacccatcattgaattttgaacatccgaacctgggagttttccctgaaacagatagtatatttgaacctgtataataatatatagtctagcgctttacggaagacaatgtatgtatttcggttcctggagaaactattgcatctattgcataggtaatcttgcacgtcgcatccccggttcattttctgcgtttccatcttgcacttcaatagcatatctttgttaacgaagcatctgtgcttcattttgtagaacaaaaatgcaacgcgagagcgctaatttttcaaacaaagaatctgagctgcatttttacagaacagaaatgcaacgcgaaagcgctattttaccaacgaagaatctgtgcttcatttttgtaaaacaaaaatgcaacgcgacgagagcgctaatttttcaaacaaagaatctgagctgcatttttacagaacagaaatgcaacgcgagagcgctattttaccaacaaagaatctatacttcttttttgttctacaaaaatgcatcccgagagcgctatttttctaacaaagcatcttagattactttttttctcctttgtgcgctctataatgcagtctcttgataactttttgcactgtaggtccgttaaggttagaagaaggctactttggtgtctattttctcttccataaaaaaagcctgactccacttcccgcgtttactgattactagcgaagctgcgggtgcattttttcaagataaaggcatccccgattatattctataccgatgtggattgcgcatactttgtgaacagaaagtgatagcgttgatgattcttcattggtcagaaaattatgaacggtttcttctattttgtctctatatactacgtataggaaatgtttacattttcgtattgttttcgattcactctatgaatagttcttactacaatttttttgtctaaagagtaatactagagataaacataaaaaatgtagaggtcgagtttagatgcaagttcaaggagcgaaaggtggatgggtaggttatatagggatatagcacagagatatatagcaaagagatacttttgagcaatgtttgtggaagcggtattcgcaatgggaagctccaccccggttgataatcagaaaagccccaaaaacaggaagattgtataagcaaatatttaaattgtaaacgttaatattttgttaaaattcgcgttaaatttttgttaaatcagctcattttttaacgaatagcccgaaatcggcaaaatcccttataaatcaaaagaatagaccgagatagggttgagtgttgttccagtttccaacaagagtccactattaaagaacgtggactccaacgtcaaagggcgaaaaagggtctatcagggcgatggcccactacgtgaaccatcaccctaatcaagttttttggggtcgaggtgccgtaaagcagtaaatcggaagggtaaacggatgcccccatttagagcttgacggggaaagccggcgaacgtggcgagaaaggaagggaagaaagcgaaaggagcgggggctagggcggtgggaagtgtaggggtcacgctgggcgtaaccaccacacccgccgcgcttaatggggcgctacagggcgcgtggggatgatccactagtacggattagaagccgccgagcgggtgacagccctccgaaggaagactctcctccgtgcgtcctcgtcttcaccggtcgcgttcctgaaacgcagatgtgcctcgcgccgcactgctccgaacaataaagattctacaatactagcttttatggttatgaagaggaaaaattggcagtaacctggccccacaaaccttcaaatgaacgaatcaaattaacaaccataggatgataatgcgattagttttttagccttatttctggggtaattaatcagcgaagcgatgatttttgatctattaacagatatataaatgcaaaaactgcataaccactttaactaatactttcaacattttcggtttgtattacttcttattcaaatgtaataaaagtatcaacaaaaaattgttaatatacctctatactttaacgtcaaggagaaaaaaccccggatcggactactagcagctgtaatacgactcactatagggaatattaagcttaaacaatggaagaatccggtttcaccatcgatttggtttctgaagctcatttggttaaggctggtttgtctagagaagatgctggtgtttttttcgctcaattgcaagctatcgttacccaagaaagaagatcccaatctaacatctggcagagaatctccaaagaattgctaagaccatggcatccatttccattgcatcagttgttgtactactcttcttatggtgattgggatgtttctactagaggtccaccattgggttggattccaactccagaaattgctagacaatctaacttgggtaggatcttggaaagaaagggtagagaagttttgggtgagaagtatagatctccaactgaatctttgccagaattgcaaagatggtcttttgaacatccagagttgtacttgccattggtttgggaacatcaatccttgatctttcatcaacacccaagatgtttcttggacacttctgatgaagctaatcaaggtggtgtttggttgccaggtgctcatttgaatgttgctgaatgttgtttggctgctaagggttctaaaaccgattcctctattgccatcatgtacagaaatgaaggtgaagatgatttgccagtcagagaaattaccttgtcacaattgagagccgatgtttctagagttgctaattctttggaagccttgggttttaagaagggtgattccattgctatcgacatgcaaatgaatgttcaagctgttactgcttacttggccattattttggctggttgtgttgttgtttccatcccagattctttcgttgctaaagaaattgccatcaggatcagaatttctaaggctaaggctatcttcacccaagacgttattcaaagaggtggtaagaagttgccactatactccagagttattgaatctaaagctccattggctatcgttttgccagctgatggtaaagctagttctttgtctttgagaaacggtgatttgtcctgggatgaatttttggttagagccgaacatttgtctagaccagatgagtacaaaccagtcatccaatctatggattcctacaccaatatcttgttctcttctggtactactggtgaacctaaagctattccatggactcaacatactccattgagatgtgctgctgattcttgggctcatttggattctagacaaggtgatgttttgtgttggccaactaatttgggttggatggttggtccaatgatcgtttattctgcttttgttaacggtgctactttggccttgtataatggttctccattggatagaggtttcggtaagtttgttcaagatgctaaggttaccatgttgggtactgttccatctttagttagagcttggaaggcttctggttgtatggctaatttggattggactgctattagagcttttggttcttctggtgaaacctcctctgttgatgatgatttgtggttgtctgctcaagctggttacaaaccagttttggaatgttgtggtggtactgaattgggtgctatgtatgttggtggtaatttggttcaaccacaagcctttgctgctttttctactgttggtatgactttcaggatctacatcttggatgattccaacaatccatacccagatgaagctgcttgtactggtgaattggttttacatccacataacttcggttcctcttctactttgttgaatgccgatcatcacaaggtttactatcaaggtatgccacatttcaacggtaagcaattgagaaggcatggtgatatcttccaaagatttcatggtggtttctacaaggctcatggtagatctgatgataccatgaatttgggtggtattaaggcttccgccattgaaattgaacaagtctgtaacaaagcccacgaatctgttcaagaaactgctgctatttctgttcaaccaccaagaggtggtccagaagaattggttattgctgctgttttgaagccaggttacaacatctcttctaaagagttgcaaaagatcttcttgtcccacgtcatgtctaatttgaaccctttgttcaaagttagagccgttgctgtttttccagattttccaagaactgcctctaacaagttgttgagaagagtcttgagaattgaatgcgccaagttgttgtattctgctccacaatctagattactcgagcatgcatctagagggccgcatcatgtaattagttatgtcacgcttacattcacgccctccccccacatccgctctaaccgaaaaggaaggagttagacaacctgaagtctaggtccctatttatttttttatagttatgttagtattaagaacgttatttatatttcaaatttttcttttttttctgtacagacgcgtgtacgcatgtaacattatactgaaaaccttgcttgagaaggttttgggacgctcgaaggctttaatttgcggccctgcattaatgaatcggccaacgcgcggggagaggcggtttgcgtattgggcgctcttccgcttcctcgctcactgactcgctgcgctcggtcgttcggctgcggcgagcggtatcagctcactcaaaggcggtaatacggttatccacagaatcaggggataacgcaggaaagaacatgtgagcaaaaggccagcaaaagcccaggaaccgtaaaaaggccgcgttgctggcgtttttccataggctccgcccccctgacgagcatcacaaaaatcgacgctcaagtcagaggtggcgaaacccgacaggactataaagataccaggcgtttccccctggaagctccctcgtgcgctctcctgttccgaccctgccgcttaccggatacctgtccgcctttctcccttcgggaagcgtggcgctttctcatagctcacgctgtaggtatctcagttcggtgtaggtcgttcgctccaagctgggctgtgtgcacgaaccccccgttcagcccgaccgctgcgccttatccggtaactatcgtcttgagtccaacccggtaagacacgacttatcgccactggcagcagccactggtaacaggattagcagagcgaggtatgtaggcggtgctacagagttcttgaagtggtggcctaactacggctacactagaaggacagtatttggtatctgcgctctgctgaagccagttaccttcggaaaaagagttggtagctcttgatccggcaaacaaaccaccgctggtagcggtggtttttttgtttgcaagcagcagattacgcgcagaaaaaaaggatctcaagaagatcctttgatcttttctacggggtctgacgctcagtggaacgaaaactcacgttaagggattttggtcatgagattatcaaaaaggatcttcacctagatccttttaaattaaaaatgaagttttaaatcaatctaaagtatatatgagtaaacttggtctgacagttaccaatgcttaatcagtgaggcacctatctcagcgatctgtctatttcgttcatccatagttgcctgactccccgtcgtgtagataactacgatacgggagcgcttaccatctggccccagtgctgcaatgataccgcgagacccacgctcaccggctccagatttatcagcaataaaccagccagccggaagggccgagcgcagaagtggtcctgcaactttatccgcctccattcagtctattaattgttgccgggaagctagagtaagtagttcgccagttaatagtttgcgcaacgttgttggcattgctacaggcatcgtggtgtcactctcgtcgtttggtatggcttcattcagctccggttcccaacgatcaaggcgagttacatgatcccccatgttgtgcaaaaaagcggttagctccttcggtcctccgatcgttgtcagaagtaagttggccgcagtgttatcactcatggttatggcagcactgcataattctcttactgtcatgccatccgtaagatgcttttctgtgactggtgagtactcaaccaagtcattctgagaatagtgtatgcggcgaccgagttgctcttgcccggcgtcaatacgggataatagtgtatcacatagcagaactttaaaagtgctcatcattggaaaacgttcttcggggcgaaaactctcaaggatcttaccgctgttgagatccagttcgatgtaacccactcgtgcacccaactgatcttcagcatcttttactttcaccagcgtttctgggtgagcaaaaacaggaaggcaaaatgccgcaaaaaagggaataagggcgacacggaaatgttgaatactcatactcttcctttttcaatgggtaataactgatataattaaattgaagctctaatttgtgagtttagtatacatgcatttacttataatacagttttttagttttgctggccgcatcttctcaaatatgcttcccagcctgcttttctgtaacgttcaccctctaccttagcatcccttccctttgcaaatagtcctcttccaacaataataatgtcagatcctgtagagaccacatcatccacggttctatactgttgacccaatgcgtctcccttgtcatctaaacccacaccgggtgtcataatcaaccaatcgtaaccttcatctcttccacccatgtctctttgagcaataaagccgataacaaaatctttgtcgctcttcgcaatgtcaacagtacccttagtatattctccagtagatagggagcccttgcatgacaattctgctaacatcaaaaggcctctaggttcctttgttacttcttctgccgcctgcttcaaaccgctaacaatacctgggcccaccacaccgtgtgcattcgtaatgtctgcccattctgctattctgtatacacccgcagagtactgcaatttgactgtattaccaatgtcagcaaattttctgtcttcg

SEQ ID NO: 357 - DNA, 7978 bp, Artificial Sequence
  PLAS456
aagagtaaaaaattgtacttggcggataatgcctttagcggcttaactgtgccctccatggaaaaatcagtcaagatatccacatgtgtttttagtaaacaaattttgggacctaatgcttcaactaactccagtaattccttggtggtacgaacatccaatgaagcacacaagtttgtttgcttttcgtgcatgatattaaatagcttggcagcaacaggactaggatgagtagcagcacgttccttatatgtagctttcgacatgatttatcttcgtttcctgcaggtttttgttctgtgcagttgggttaagaatactgggcaatttcatgtttcttcaacactacatatgcgtatatataccaatctaagtctgtgctccttccttcgttcttccttctgttcggagattaccgaatcaaaaaaatttcaaagaaaccgaaatcaaaaaaaagaataaaaaaaaaatgatgaattgaattgaaaagctagcttatcgatgataagctgtcaaagatgagaattaattccacggactatagactatactagatactccgtctactgtacgatacacttccgctcaggtccttgtcctttaacgaggccttaccactcttttgttactctattgatccagctcagcaaaggcagtgtgatctaagattctatcttcgcgatgtagtaaaactagctagaccgagaaagagactagaaatgcaaaaggcacttctacaatggctgccatcattattatccgatgtgacgctgcagcttctcaatgatattcgaatacgctttgaggagatacagcctaatatccgacaaactgttttacagatttacgatcgtacttgttacccatcattgaattttgaacatccgaacctgggagttttccctgaaacagatagtatatttgaacctgtataataatatatagtctagcgctttacggaagacaatgtatgtatttcggttcctggagaaactattgcatctattgcataggtaatcttgcacgtcgcatccccggttcattttctgcgtttccatcttgcacttcaatagcatatctttgttaacgaagcatctgtgcttcattttgtagaacaaaaatgcaacgcgagagcgctaatttttcaaacaaagaatctgagctgcatttttacagaacagaaatgcaacgcgaaagcgctattttaccaacgaagaatctgtgcttcatttttgtaaaacaaaaatgcaacgcgacgagagcgctaatttttcaaacaaagaatctgagctgcatttttacagaacagaaatgcaacgcgagagcgctattttaccaacaaagaatctatacttcttttttgttctacaaaaatgcatcccgagagcgctatttttctaacaaagcatcttagattactttttttctcctttgtgcgctctataatgcagtctcttgataactttttgcactgtaggtccgttaaggttagaagaaggctactttggtgtctattttctcttccataaaaaaagcctgactccacttcccgcgtttactgattactagcgaagctgcgggtgcattttttcaagataaaggcatccccgattatattctataccgatgtggattgcgcatactttgtgaacagaaagtgatagcgttgatgattcttcattggtcagaaaattatgaacggtttcttctattttgtctctatatactacgtataggaaatgtttacattttcgtattgttttcgattcactctatgaatagttcttactacaatttttttgtctaaagagtaatactagagataaacataaaaaatgtagaggtcgagtttagatgcaagttcaaggagcgaaaggtggatgggtaggttatatagggatatagcacagagatatatagcaaagagatacttttgagcaatgtttgtggaagcggtattcgcaatgggaagctccaccccggttgataatcagaaaagccccaaaaacaggaagattgtataagcaaatatttaaattgtaaacgttaatattttgttaaaattcgcgttaaatttttgttaaatcagctcattttttaacgaatagcccgaaatcggcaaaatcccttataaatcaaaagaatagaccgagatagggttgagtgttgttccagtttccaacaagagtccactattaaagaacgtggactccaacgtcaaagggcgaaaaagggtctatcagggcgatggcccactacgtgaaccatcaccctaatcaagttttttggggtcgaggtgccgtaaagcagtaaatcggaagggtaaacggatgcccccatttagagcttgacggggaaagccggcgaacgtggcgagaaaggaagggaagaaagcgaaaggagcgggggctagggcggtgggaagtgtaggggtcacgctgggcgtaaccaccacacccgccgcgcttaatggggcgctacagggcgcgtggggatgatccactagtacggattagaagccgccgagcgggtgacagccctccgaaggaagactctcctccgtgcgtcctcgtcttcaccggtcgcgttcctgaaacgcagatgtgcctcgcgccgcactgctccgaacaataaagattctacaatactagcttttatggttatgaagaggaaaaattggcagtaacctggccccacaaaccttcaaatgaacgaatcaaattaacaaccataggatgataatgcgattagttttttagccttatttctggggtaattaatcagcgaagcgatgatttttgatctattaacagatatataaatgcaaaaactgcataaccactttaactaatactttcaacattttcggtttgtattacttcttattcaaatgtaataaaagtatcaacaaaaaattgttaatatacctctatactttaacgtcaaggagaaaaaaccccggatcggactactagcagctgtaatacgactcactatagggaatattaagcttaaacaatggctgcttctgctagaggttctgtttgggaaattcaacctagagatgttgaagctgctggtttggctgctgctgatgctgctgcttttgttgctgctttgagatcagctgctgctgctgcaggttctggtgctactagagatgctgtttgggctgctgttgctgccgctggtgttttaagaccagaacatccacatgctttacaccaattggtttactactctacttatgccggttgggatagagatgctagaggtccaccaccatattggtttccatctccaattgattgcaagcagactaacttgggtagattgatggaagctaatggtccaaagttgttgggttcttcttacaaggatccaatctcttccttgtcccatttctacagattctccgtcgaaaatcaagaggtttactggtctatggtcttgaagcaattggctgttaatttcaagcaagagccaaggtctattttgtccacttctgatagatctaagaagggtggtacttggttgcaaggtgctgttttgaatattgctgaatgttgtttgttgccatgcccatctttgaagagaactgatgattctaccgccatcatttggagagatgaaggtttggatgattacccagttaacagaatgtccttgaaagaattgagaggtcaagttattaccgttgctcatgctttggatgctatgtttgaaaagggtgatagaatcgccattgatatgccaatgacttgtaacgccgttattatctacttggccattattttgggtggtttcgttgttgtttccattgctgattcttttgccccacaagaaattggttctagaatgggtgtttctaaggctaaggctattttcacccaagatttcatagttaggggtggtaagaaggtcccattatactctagagttgttcagggtacttcttccaaggctgttgttattccagctattggtgattccattggtatcactttgagaaacggtgatatgtcctggaaggattttttgtctagagctgctggtagatcctcttcatattctccagtttaccaatccgttgatgccttgaccaatatcttgttttcttctggtactaccggtgaacctaaagctattccatggactcaattgtctccaattagatgtgcttctgatacttgggctcatttggatgttagaccatgtgaaattggttgttggccaactaatttgggttgggttatgggtccaattatcatctactcttgtttcttgaatggtgctgctttggcattatatcatggttctccattgggtagagatttctgcaagtttgttcaagatgctggtgttactgttttgggttctgttccatctttggttaagtcttggaaagctggtaattgtgccgaaggtttagattggactaagatcagagttttgggtactactggtgaagcctctgatattgatgataacttgtggttgacttccagagcttcttataagccaatcgttgaatgttgtggtggtactgaattggcctcatcttatattcaaggttctttgttgaggccacaagtttttggtgctttttctggtgcttctatgtctaccggtttcgttattttggatgaacaaggtactccatacccagatgatgttccatgtactggtgaagttggtttgtttcctctatactttggtgcttcagataggttgttgaatgccaaccatgataaggtttacttcgatggtatgccaatctacaagggtagacaattgagaaggcatggtgatattatccaaagaactgttggtggttactacatcgttcaaggtagagctgatgataccatgaatttgggtggtattaagacctcctccgttgaaattgaaagagtctgtaatagagccgacgaatgtttgttggaaactgctgctgtttctattaagccatctggtggtggtccagaacatttggctattttggctgttttgaaggatagatccgctcaatacgatgtcaacttgttgaagagaaagttccaaaccgccatccaaaagaatttgaaccctttgttcaaggtgtcctacgttaaggttgttccagaatttccaagaaccgcttctaacaagttgttgagaagagtcttgagagatcaattggcccaagaattgtctaacaggtctaagttgctcgagcatgcatctagagggccgcatcatgtaattagttatgtcacgcttacattcacgccctccccccacatccgctctaaccgaaaaggaaggagttagacaacctgaagtctaggtccctatttatttttttatagttatgttagtattaagaacgttatttatatttcaaatttttcttttttttctgtacagacgcgtgtacgcatgtaacattatactgaaaaccttgcttgagaaggttttgggacgctcgaaggctttaatttgcggccctgcattaatgaatcggccaacgcgcggggagaggcggtttgcgtattgggcgctcttccgcttcctcgctcactgactcgctgcgctcggtcgttcggctgcggcgagcggtatcagctcactcaaaggcggtaatacggttatccacagaatcaggggataacgcaggaaagaacatgtgagcaaaaggccagcaaaagcccaggaaccgtaaaaaggccgcgttgctggcgtttttccataggctccgcccccctgacgagcatcacaaaaatcgacgctcaagtcagaggtggcgaaacccgacaggactataaagataccaggcgtttccccctggaagctccctcgtgcgctctcctgttccgaccctgccgcttaccggatacctgtccgcctttctcccttcgggaagcgtggcgctttctcatagctcacgctgtaggtatctcagttcggtgtaggtcgttcgctccaagctgggctgtgtgcacgaaccccccgttcagcccgaccgctgcgccttatccggtaactatcgtcttgagtccaacccggtaagacacgacttatcgccactggcagcagccactggtaacaggattagcagagcgaggtatgtaggcggtgctacagagttcttgaagtggtggcctaactacggctacactagaaggacagtatttggtatctgcgctctgctgaagccagttaccttcggaaaaagagttggtagctcttgatccggcaaacaaaccaccgctggtagcggtggtttttttgtttgcaagcagcagattacgcgcagaaaaaaaggatctcaagaagatcctttgatcttttctacggggtctgacgctcagtggaacgaaaactcacgttaagggattttggtcatgagattatcaaaaaggatcttcacctagatccttttaaattaaaaatgaagttttaaatcaatctaaagtatatatgagtaaacttggtctgacagttaccaatgcttaatcagtgaggcacctatctcagcgatctgtctatttcgttcatccatagttgcctgactccccgtcgtgtagataactacgatacgggagcgcttaccatctggccccagtgctgcaatgataccgcgagacccacgctcaccggctccagatttatcagcaataaaccagccagccggaagggccgagcgcagaagtggtcctgcaactttatccgcctccattcagtctattaattgttgccgggaagctagagtaagtagttcgccagttaatagtttgcgcaacgttgttggcattgctacaggcatcgtggtgtcactctcgtcgtttggtatggcttcattcagctccggttcccaacgatcaaggcgagttacatgatcccccatgttgtgcaaaaaagcggttagctccttcggtcctccgatcgttgtcagaagtaagttggccgcagtgttatcactcatggttatggcagcactgcataattctcttactgtcatgccatccgtaagatgcttttctgtgactggtgagtactcaaccaagtcattctgagaatagtgtatgcggcgaccgagttgctcttgcccggcgtcaatacgggataatagtgtatcacatagcagaactttaaaagtgctcatcattggaaaacgttcttcggggcgaaaactctcaaggatcttaccgctgttgagatccagttcgatgtaacccactcgtgcacccaactgatcttcagcatcttttactttcaccagcgtttctgggtgagcaaaaacaggaaggcaaaatgccgcaaaaaagggaataagggcgacacggaaatgttgaatactcatactcttcctttttcaatgggtaataactgatataattaaattgaagctctaatttgtgagtttagtatacatgcatttacttataatacagttttttagttttgctggccgcatcttctcaaatatgcttcccagcctgcttttctgtaacgttcaccctctaccttagcatcccttccctttgcaaatagtcctcttccaacaataataatgtcagatcctgtagagaccacatcatccacggttctatactgttgacccaatgcgtctcccttgtcatctaaacccacaccgggtgtcataatcaaccaatcgtaaccttcatctcttccacccatgtctctttgagcaataaagccgataacaaaatctttgtcgctcttcgcaatgtcaacagtacccttagtatattctccagtagatagggagcccttgcatgacaattctgctaacatcaaaaggcctctaggttcctttgttacttcttctgccgcctgcttcaaaccgctaacaatacctgggcccaccacaccgtgtgcattcgtaatgtctgcccattctgctattctgtatacacccgcagagtactgcaatttgactgtattaccaatgtcagcaaattttctgtcttcg

SEQ ID NO: 358 - DNA, 7843 bp, Artificial Sequence
  PLAS457
aagagtaaaaaattgtacttggcggataatgcctttagcggcttaactgtgccctccatggaaaaatcagtcaagatatccacatgtgtttttagtaaacaaattttgggacctaatgcttcaactaactccagtaattccttggtggtacgaacatccaatgaagcacacaagtttgtttgcttttcgtgcatgatattaaatagcttggcagcaacaggactaggatgagtagcagcacgttccttatatgtagctttcgacatgatttatcttcgtttcctgcaggtttttgttctgtgcagttgggttaagaatactgggcaatttcatgtttcttcaacactacatatgcgtatatataccaatctaagtctgtgctccttccttcgttcttccttctgttcggagattaccgaatcaaaaaaatttcaaagaaaccgaaatcaaaaaaaagaataaaaaaaaaatgatgaattgaattgaaaagctagcttatcgatgataagctgtcaaagatgagaattaattccacggactatagactatactagatactccgtctactgtacgatacacttccgctcaggtccttgtcctttaacgaggccttaccactcttttgttactctattgatccagctcagcaaaggcagtgtgatctaagattctatcttcgcgatgtagtaaaactagctagaccgagaaagagactagaaatgcaaaaggcacttctacaatggctgccatcattattatccgatgtgacgctgcagcttctcaatgatattcgaatacgctttgaggagatacagcctaatatccgacaaactgttttacagatttacgatcgtacttgttacccatcattgaattttgaacatccgaacctgggagttttccctgaaacagatagtatatttgaacctgtataataatatatagtctagcgctttacggaagacaatgtatgtatttcggttcctggagaaactattgcatctattgcataggtaatcttgcacgtcgcatccccggttcattttctgcgtttccatcttgcacttcaatagcatatctttgttaacgaagcatctgtgcttcattttgtagaacaaaaatgcaacgcgagagcgctaatttttcaaacaaagaatctgagctgcatttttacagaacagaaatgcaacgcgaaagcgctattttaccaacgaagaatctgtgcttcatttttgtaaaacaaaaatgcaacgcgacgagagcgctaatttttcaaacaaagaatctgagctgcatttttacagaacagaaatgcaacgcgagagcgctattttaccaacaaagaatctatacttcttttttgttctacaaaaatgcatcccgagagcgctatttttctaacaaagcatcttagattactttttttctcctttgtgcgctctataatgcagtctcttgataactttttgcactgtaggtccgttaaggttagaagaaggctactttggtgtctattttctcttccataaaaaaagcctgactccacttcccgcgtttactgattactagcgaagctgcgggtgcattttttcaagataaaggcatccccgattatattctataccgatgtggattgcgcatactttgtgaacagaaagtgatagcgttgatgattcttcattggtcagaaaattatgaacggtttcttctattttgtctctatatactacgtataggaaatgtttacattttcgtattgttttcgattcactctatgaatagttcttactacaatttttttgtctaaagagtaatactagagataaacataaaaaatgtagaggtcgagtttagatgcaagttcaaggagcgaaaggtggatgggtaggttatatagggatatagcacagagatatatagcaaagagatacttttgagcaatgtttgtggaagcggtattcgcaatgggaagctccaccccggttgataatcagaaaagccccaaaaacaggaagattgtataagcaaatatttaaattgtaaacgttaatattttgttaaaattcgcgttaaatttttgttaaatcagctcattttttaacgaatagcccgaaatcggcaaaatcccttataaatcaaaagaatagaccgagatagggttgagtgttgttccagtttccaacaagagtccactattaaagaacgtggactccaacgtcaaagggcgaaaaagggtctatcagggcgatggcccactacgtgaaccatcaccctaatcaagttttttggggtcgaggtgccgtaaagcagtaaatcggaagggtaaacggatgcccccatttagagcttgacggggaaagccggcgaacgtggcgagaaaggaagggaagaaagcgaaaggagcgggggctagggcggtgggaagtgtaggggtcacgctgggcgtaaccaccacacccgccgcgcttaatggggcgctacagggcgcgtggggatgatccactagtacggattagaagccgccgagcgggtgacagccctccgaaggaagactctcctccgtgcgtcctcgtcttcaccggtcgcgttcctgaaacgcagatgtgcctcgcgccgcactgctccgaacaataaagattctacaatactagcttttatggttatgaagaggaaaaattggcagtaacctggccccacaaaccttcaaatgaacgaatcaaattaacaaccataggatgataatgcgattagttttttagccttatttctggggtaattaatcagcgaagcgatgatttttgatctattaacagatatataaatgcaaaaactgcataaccactttaactaatactttcaacattttcggtttgtattacttcttattcaaatgtaataaaagtatcaacaaaaaattgttaatatacctctatactttaacgtcaaggagaaaaaaccccggatcggactactagcagctgtaatacgactcactatagggaatattaagcttaaacaatggccaagcaattgtccttggaacaaatttctcaatgcggtgttgatcaaactattgctgctgctattttgccacaaatcaatcaatctttggcctccttgattccagttgattgctggcaatatttgattaagggtgtcttgaagccaaactacccatttccattgcatgagttgttgtaccataccgttttttccgattgggaatcttctaaaggttttccaccagcttggatcccatccaaagaacaaattcaagctaccaacattgctgccttgatgaaggaattggatattgcctctcattccgaattgcatgcttggtctgttcaaaattgtgctcaattctgggaagtcatgatcgaaagattgaacatttgcttccaagccaagtacacccaaatcgttgatttgtctcatggtgttgaatctccacaatggttggttaatgccagattgaatattgccgaatcctgttttcaagccccaagaaacaataccgctattatttggcaaccagaaggtggttctttgtctactttgacttatggtgaattggaagccttgactaacagagttgctaactctttgttgaacgttggttttgctccaggtgatagattggctattgctatgccaatgactgctgaatctgttgctatctacttgggtattatcaaggctggttgtgttgttgtttccattgctgattctttggccggtgaagaaattgccattagattgcaattgtctcaagccaaggctattttcacccaagattacattttgagagctggtaagcacttgccattatacgccaagattattgatgctaatgctccaaaggctatcgttttggctaacaactcttcattgaccgtcaagttgagacaacaagatttgtcttgggacgaattcttgtctccacaagaacaatttgatgccattccagttcatccagatgcttacaccaatatcttgttctcttctggtactactggtgaacctaaagctattccatggactcatacaactccaatcaaatgtggtgttgatggttacttgcatcatgatattcatccaccagatgttgttgcttggccaactaatttgggttggatgatgggtccttggttgatatatgcttccttgattaaccatgctacgatcgccttgtattatggtactccaactgaaagagaattcggtagatttgttcaagacggtagagttaacatcttgggtgttgttccatctttggttaacacttggaaggttacccaatgtatgcaaggtttggattggtctgctattagagctttttcttctaccggtgaatgttctactccacaagatatgttgttcttgatgtctttggctggttacaagccaattattgaatactgtggtggtactgaaattggtggtggttatttgacttccactttggttcatccatgttctccatctacttttactactccagctttgggtttggatttggctatagttgacgaaaatggtcatgctgctgatagaggtgaagccttcattattccaccatctattggtttgtctaccgagttgttgaacaaggatcatcaccaagtttacttcgctgatactccatctattgccaactcttctattaccttgagaaggcacggtgacagattggaaagattgccaaattcttactacagagcacaaggtagagctgatgatacaatgaatttgggtggtatcaaggtttcctccgctgaaattgaaagagttttgtctaccgttaagggcatttctgaaactgctgctattgctatttctccaactcaaggtggtccatcccaattgattatctatgctgttgttgctccacaatggcaaactgatagagatactttgatggtgtcattgcaaaccgccatcaaagaacatttgaaccctttgttcaagatctccgatttggaattggttgaatctttgccaagaacctcctctaacaaggttatgagaagagtcttgagagatcagtaccacatcaagtacttgtccactgttctcgagcatgcatctagagggccgcatcatgtaattagttatgtcacgcttacattcacgccctccccccacatccgctctaaccgaaaaggaaggagttagacaacctgaagtctaggtccctatttatttttttatagttatgttagtattaagaacgttatttatatttcaaatttttcttttttttctgtacagacgcgtgtacgcatgtaacattatactgaaaaccttgcttgagaaggttttgggacgctcgaaggctttaatttgcggccctgcattaatgaatcggccaacgcgcggggagaggcggtttgcgtattgggcgctcttccgcttcctcgctcactgactcgctgcgctcggtcgttcggctgcggcgagcggtatcagctcactcaaaggcggtaatacggttatccacagaatcaggggataacgcaggaaagaacatgtgagcaaaaggccagcaaaagcccaggaaccgtaaaaaggccgcgttgctggcgtttttccataggctccgcccccctgacgagcatcacaaaaatcgacgctcaagtcagaggtggcgaaacccgacaggactataaagataccaggcgtttccccctggaagctccctcgtgcgctctcctgttccgaccctgccgcttaccggatacctgtccgcctttctcccttcgggaagcgtggcgctttctcatagctcacgctgtaggtatctcagttcggtgtaggtcgttcgctccaagctgggctgtgtgcacgaaccccccgttcagcccgaccgctgcgccttatccggtaactatcgtcttgagtccaacccggtaagacacgacttatcgccactggcagcagccactggtaacaggattagcagagcgaggtatgtaggcggtgctacagagttcttgaagtggtggcctaactacggctacactagaaggacagtatttggtatctgcgctctgctgaagccagttaccttcggaaaaagagttggtagctcttgatccggcaaacaaaccaccgctggtagcggtggtttttttgtttgcaagcagcagattacgcgcagaaaaaaaggatctcaagaagatcctttgatcttttctacggggtctgacgctcagtggaacgaaaactcacgttaagggattttggtcatgagattatcaaaaaggatcttcacctagatccttttaaattaaaaatgaagttttaaatcaatctaaagtatatatgagtaaacttggtctgacagttaccaatgcttaatcagtgaggcacctatctcagcgatctgtctatttcgttcatccatagttgcctgactccccgtcgtgtagataactacgatacgggagcgcttaccatctggccccagtgctgcaatgataccgcgagacccacgctcaccggctccagatttatcagcaataaaccagccagccggaagggccgagcgcagaagtggtcctgcaactttatccgcctccattcagtctattaattgttgccgggaagctagagtaagtagttcgccagttaatagtttgcgcaacgttgttggcattgctacaggcatcgtggtgtcactctcgtcgtttggtatggcttcattcagctccggttcccaacgatcaaggcgagttacatgatcccccatgttgtgcaaaaaagcggttagctccttcggtcctccgatcgttgtcagaagtaagttggccgcagtgttatcactcatggttatggcagcactgcataattctcttactgtcatgccatccgtaagatgcttttctgtgactggtgagtactcaaccaagtcattctgagaatagtgtatgcggcgaccgagttgctcttgcccggcgtcaatacgggataatagtgtatcacatagcagaactttaaaagtgctcatcattggaaaacgttcttcggggcgaaaactctcaaggatcttaccgctgttgagatccagttcgatgtaacccactcgtgcacccaactgatcttcagcatcttttactttcaccagcgtttctgggtgagcaaaaacaggaaggcaaaatgccgcaaaaaagggaataagggcgacacggaaatgttgaatactcatactcttcctttttcaatgggtaataactgatataattaaattgaagctctaatttgtgagtttagtatacatgcatttacttataatacagttttttagttttgctggccgcatcttctcaaatatgcttcccagcctgcttttctgtaacgttcaccctctaccttagcatcccttccctttgcaaatagtcctcttccaacaataataatgtcagatcctgtagagaccacatcatccacggttctatactgttgacccaatgcgtctcccttgtcatctaaacccacaccgggtgtcataatcaaccaatcgtaaccttcatctcttccacccatgtctctttgagcaataaagccgataacaaaatctttgtcgctcttcgcaatgtcaacagtacccttagtatattctccagtagatagggagcccttgcatgacaattctgctaacatcaaaaggcctctaggttcctttgttacttcttctgccgcctgcttcaaaccgctaacaatacctgggcccaccacaccgtgtgcattcgtaatgtctgcccattctgctattctgtatacacccgcagagtactgcaatttgactgtattaccaatgtcagcaaattttctgtcttcg

SEQ ID NO: 359 - DNA, 7966 bp, Artificial Sequence
  PLAS458
aagagtaaaaaattgtacttggcggataatgcctttagcggcttaactgtgccctccatggaaaaatcagtcaagatatccacatgtgtttttagtaaacaaattttgggacctaatgcttcaactaactccagtaattccttggtggtacgaacatccaatgaagcacacaagtttgtttgcttttcgtgcatgatattaaatagcttggcagcaacaggactaggatgagtagcagcacgttccttatatgtagctttcgacatgatttatcttcgtttcctgcaggtttttgttctgtgcagttgggttaagaatactgggcaatttcatgtttcttcaacactacatatgcgtatatataccaatctaagtctgtgctccttccttcgttcttccttctgttcggagattaccgaatcaaaaaaatttcaaagaaaccgaaatcaaaaaaaagaataaaaaaaaaatgatgaattgaattgaaaagctagcttatcgatgataagctgtcaaagatgagaattaattccacggactatagactatactagatactccgtctactgtacgatacacttccgctcaggtccttgtcctttaacgaggccttaccactcttttgttactctattgatccagctcagcaaaggcagtgtgatctaagattctatcttcgcgatgtagtaaaactagctagaccgagaaagagactagaaatgcaaaaggcacttctacaatggctgccatcattattatccgatgtgacgctgcagcttctcaatgatattcgaatacgctttgaggagatacagcctaatatccgacaaactgttttacagatttacgatcgtacttgttacccatcattgaattttgaacatccgaacctgggagttttccctgaaacagatagtatatttgaacctgtataataatatatagtctagcgctttacggaagacaatgtatgtatttcggttcctggagaaactattgcatctattgcataggtaatcttgcacgtcgcatccccggttcattttctgcgtttccatcttgcacttcaatagcatatctttgttaacgaagcatctgtgcttcattttgtagaacaaaaatgcaacgcgagagcgctaatttttcaaacaaagaatctgagctgcatttttacagaacagaaatgcaacgcgaaagcgctattttaccaacgaagaatctgtgcttcatttttgtaaaacaaaaatgcaacgcgacgagagcgctaatttttcaaacaaagaatctgagctgcatttttacagaacagaaatgcaacgcgagagcgctattttaccaacaaagaatctatacttcttttttgttctacaaaaatgcatcccgagagcgctatttttctaacaaagcatcttagattactttttttctcctttgtgcgctctataatgcagtctcttgataactttttgcactgtaggtccgttaaggttagaagaaggctactttggtgtctattttctcttccataaaaaaagcctgactccacttcccgcgtttactgattactagcgaagctgcgggtgcattttttcaagataaaggcatccccgattatattctataccgatgtggattgcgcatactttgtgaacagaaagtgatagcgttgatgattcttcattggtcagaaaattatgaacggtttcttctattttgtctctatatactacgtataggaaatgtttacattttcgtattgttttcgattcactctatgaatagttcttactacaatttttttgtctaaagagtaatactagagataaacataaaaaatgtagaggtcgagtttagatgcaagttcaaggagcgaaaggtggatgggtaggttatatagggatatagcacagagatatatagcaaagagatacttttgagcaatgtttgtggaagcggtattcgcaatgggaagctccaccccggttgataatcagaaaagccccaaaaacaggaagattgtataagcaaatatttaaattgtaaacgttaatattttgttaaaattcgcgttaaatttttgttaaatcagctcattttttaacgaatagcccgaaatcggcaaaatcccttataaatcaaaagaatagaccgagatagggttgagtgttgttccagtttccaacaagagtccactattaaagaacgtggactccaacgtcaaagggcgaaaaagggtctatcagggcgatggcccactacgtgaaccatcaccctaatcaagttttttggggtcgaggtgccgtaaagcagtaaatcggaagggtaaacggatgcccccatttagagcttgacggggaaagccggcgaacgtggcgagaaaggaagggaagaaagcgaaaggagcgggggctagggcggtgggaagtgtaggggtcacgctgggcgtaaccaccacacccgccgcgcttaatggggcgctacagggcgcgtggggatgatccactagtacggattagaagccgccgagcgggtgacagccctccgaaggaagactctcctccgtgcgtcctcgtcttcaccggtcgcgttcctgaaacgcagatgtgcctcgcgccgcactgctccgaacaataaagattctacaatactagcttttatggttatgaagaggaaaaattggcagtaacctggccccacaaaccttcaaatgaacgaatcaaattaacaaccataggatgataatgcgattagttttttagccttatttctggggtaattaatcagcgaagcgatgatttttgatctattaacagatatataaatgcaaaaactgcataaccactttaactaatactttcaacattttcggtttgtattacttcttattcaaatgtaataaaagtatcaacaaaaaattgttaatatacctctatactttaacgtcaaggagaaaaaaccccggatcggactactagcagctgtaatacgactcactatagggaatattaagcttaaacaatgggtatgagagttgctgaagttggtgttggtgaattggttaaggctggtttgtctatggaagaagctcaagaattcgaaagaattttgaaggctgctgttggtggtgctagaggttctgatccatctgaagtttggagagaagttgttgctagaagagttttgtctccatctcatccacatggtttacacagattggttttccattctgtttacgccgaatgggatgaatctattagaggtccaccattatactggttcccatccttgtatgaatctatgcataccaacttgggcagattgatggaaacttatggtccaagattattgggtttgtcctacaaggatccaatcacctcttattccttgttccaaaagttctccgtccaaaacttggaagtttactggtccatggtcttgaaagaattgtccgttttgtttcatagagccccaagatgtattttggacactaccgataagtctaaacatggtggtacttggttgccaggtgctgttttgaatattgctgaatgttgtttgttgccagtctcctacccaagaaaacacgataattctttggctgtcgtttggagagatgaaggtaatgatgattctccagttaacagattgaccttgaaagagttgagagaacaagttatgatggttgccaatgttttggatgctactttctctaagggtgatgctattgctattgatatgccaatgactgttcatgccgttattatctacttggctatagttttggctggtttcgttgttgtttccattgctgattctttcgccgctaaagaaattgctactagattgcatgtttccaaggccaagggtattttcactcaagattttatcgttaggggtggtagaaagttcccattatactctagagttgttgaagctgctccacacaaagttatagttttgccagctattggtactgatgttgacgttcaactaagagaacaagacttgtcttggaaggatttcttgtctcatgctgatcatttgccaagaccaaacaattactctccagtttaccaacctattgatgccgttaccaatattttgttctcttctggtactaccggtgatccaaaagctattccatggactcaagtttccccaattagatcttctgctgatgcttgggctcaaatcaatattcaagttggtgatgttttctgctggccaactaatttgggttgggttatgggtccaactatcttgtatgcttcttttttgactggtgctgctttggcattatatcatggttctccattggatagaggtttcggtaagtttgttcaagatgctggtgttactgttttgggtactgttccatctttggttaagacttggaagaacactggttgtatggaaggtttggattggaccaagattaagtcttttgcttctactggtgaaacctccaacgttgatgatgatttgtggttatcttccagagcttactacaagccaattattgaatgttgcggtggtactgaattggcctcatcttatattcaaggttctgtattgcaaccacaagcctttggtactttttctactgctgctatgactaccggtttcgttattttggacgaaaatggtgttccatacccagatgatcaaccatgtgttggtgaagtaggtttgttcccattgattatgggtgctactgattggttgttgaacgctgatcatgaagaagtttacttcaagggtatgccaatgtacaagggtatgcatttgagaaggcatggtgatattatcaagagaactgttggtggttacttcgttgttcaaggtagagctgatgataccatgaatttgggtggtattaagacctcctccgttgaaattgaaagagtttgcgataaggccgatgaatccgttttggaatctgctgctatttctactgctccattgaatggtggtccagaattattggttgttttcgtcgttttgaaaaagggttacgattgcgaacctaacgagttgaagatgaagttctctaaggccatccaaagaaacttgaaccctttgttcaaggtcaacttcgttaagatcgttccagaatttccaagaaccgcctctaacaagattttgagaagagtattgagggaccagatcaagcacgaattgtctgttagatccagaattctcgagcatgcatctagagggccgcatcatgtaattagttatgtcacgcttacattcacgccctccccccacatccgctctaaccgaaaaggaaggagttagacaacctgaagtctaggtccctatttatttttttatagttatgttagtattaagaacgttatttatatttcaaatttttcttttttttctgtacagacgcgtgtacgcatgtaacattatactgaaaaccttgcttgagaaggttttgggacgctcgaaggctttaatttgcggccctgcattaatgaatcggccaacgcgcggggagaggcggtttgcgtattgggcgctcttccgcttcctcgctcactgactcgctgcgctcggtcgttcggctgcggcgagcggtatcagctcactcaaaggcggtaatacggttatccacagaatcaggggataacgcaggaaagaacatgtgagcaaaaggccagcaaaagcccaggaaccgtaaaaaggccgcgttgctggcgtttttccataggctccgcccccctgacgagcatcacaaaaatcgacgctcaagtcagaggtggcgaaacccgacaggactataaagataccaggcgtttccccctggaagctccctcgtgcgctctcctgttccgaccctgccgcttaccggatacctgtccgcctttctcccttcgggaagcgtggcgctttctcatagctcacgctgtaggtatctcagttcggtgtaggtcgttcgctccaagctgggctgtgtgcacgaaccccccgttcagcccgaccgctgcgccttatccggtaactatcgtcttgagtccaacccggtaagacacgacttatcgccactggcagcagccactggtaacaggattagcagagcgaggtatgtaggcggtgctacagagttcttgaagtggtggcctaactacggctacactagaaggacagtatttggtatctgcgctctgctgaagccagttaccttcggaaaaagagttggtagctcttgatccggcaaacaaaccaccgctggtagcggtggtttttttgtttgcaagcagcagattacgcgcagaaaaaaaggatctcaagaagatcctttgatcttttctacggggtctgacgctcagtggaacgaaaactcacgttaagggattttggtcatgagattatcaaaaaggatcttcacctagatccttttaaattaaaaatgaagttttaaatcaatctaaagtatatatgagtaaacttggtctgacagttaccaatgcttaatcagtgaggcacctatctcagcgatctgtctatttcgttcatccatagttgcctgactccccgtcgtgtagataactacgatacgggagcgcttaccatctggccccagtgctgcaatgataccgcgagacccacgctcaccggctccagatttatcagcaataaaccagccagccggaagggccgagcgcagaagtggtcctgcaactttatccgcctccattcagtctattaattgttgccgggaagctagagtaagtagttcgccagttaatagtttgcgcaacgttgttggcattgctacaggcatcgtggtgtcactctcgtcgtttggtatggcttcattcagctccggttcccaacgatcaaggcgagttacatgatcccccatgttgtgcaaaaaagcggttagctccttcggtcctccgatcgttgtcagaagtaagttggccgcagtgttatcactcatggttatggcagcactgcataattctcttactgtcatgccatccgtaagatgcttttctgtgactggtgagtactcaaccaagtcattctgagaatagtgtatgcggcgaccgagttgctcttgcccggcgtcaatacgggataatagtgtatcacatagcagaactttaaaagtgctcatcattggaaaacgttcttcggggcgaaaactctcaaggatcttaccgctgttgagatccagttcgatgtaacccactcgtgcacccaactgatcttcagcatcttttactttcaccagcgtttctgggtgagcaaaaacaggaaggcaaaatgccgcaaaaaagggaataagggcgacacggaaatgttgaatactcatactcttcctttttcaatgggtaataactgatataattaaattgaagctctaatttgtgagtttagtatacatgcatttacttataatacagttttttagttttgctggccgcatcttctcaaatatgcttcccagcctgcttttctgtaacgttcaccctctaccttagcatcccttccctttgcaaatagtcctcttccaacaataataatgtcagatcctgtagagaccacatcatccacggttctatactgttgacccaatgcgtctcccttgtcatctaaacccacaccgggtgtcataatcaaccaatcgtaaccttcatctcttccacccatgtctctttgagcaataaagccgataacaaaatctttgtcgctcttcgcaatgtcaacagtacccttagtatattctccagtagatagggagcccttgcatgacaattctgctaacatcaaaaggcctctaggttcctttgttacttcttctgccgcctgcttcaaaccgctaacaatacctgggcccaccacaccgtgtgcattcgtaatgtctgcccattctgctattctgtatacacccgcagagtactgcaatttgactgtattaccaatgtcagcaaattttctgtcttcg

SEQ ID NO: 360 - DNA, 7981 bp, Artificial Sequence
  PLAS459
aagagtaaaaaattgtacttggcggataatgcctttagcggcttaactgtgccctccatggaaaaatcagtcaagatatccacatgtgtttttagtaaacaaattttgggacctaatgcttcaactaactccagtaattccttggtggtacgaacatccaatgaagcacacaagtttgtttgcttttcgtgcatgatattaaatagcttggcagcaacaggactaggatgagtagcagcacgttccttatatgtagctttcgacatgatttatcttcgtttcctgcaggtttttgttctgtgcagttgggttaagaatactgggcaatttcatgtttcttcaacactacatatgcgtatatataccaatctaagtctgtgctccttccttcgttcttccttctgttcggagattaccgaatcaaaaaaatttcaaagaaaccgaaatcaaaaaaaagaataaaaaaaaaatgatgaattgaattgaaaagctagcttatcgatgataagctgtcaaagatgagaattaattccacggactatagactatactagatactccgtctactgtacgatacacttccgctcaggtccttgtcctttaacgaggccttaccactcttttgttactctattgatccagctcagcaaaggcagtgtgatctaagattctatcttcgcgatgtagtaaaactagctagaccgagaaagagactagaaatgcaaaaggcacttctacaatggctgccatcattattatccgatgtgacgctgcagcttctcaatgatattcgaatacgctttgaggagatacagcctaatatccgacaaactgttttacagatttacgatcgtacttgttacccatcattgaattttgaacatccgaacctgggagttttccctgaaacagatagtatatttgaacctgtataataatatatagtctagcgctttacggaagacaatgtatgtatttcggttcctggagaaactattgcatctattgcataggtaatcttgcacgtcgcatccccggttcattttctgcgtttccatcttgcacttcaatagcatatctttgttaacgaagcatctgtgcttcattttgtagaacaaaaatgcaacgcgagagcgctaatttttcaaacaaagaatctgagctgcatttttacagaacagaaatgcaacgcgaaagcgctattttaccaacgaagaatctgtgcttcatttttgtaaaacaaaaatgcaacgcgacgagagcgctaatttttcaaacaaagaatctgagctgcatttttacagaacagaaatgcaacgcgagagcgctattttaccaacaaagaatctatacttcttttttgttctacaaaaatgcatcccgagagcgctatttttctaacaaagcatcttagattactttttttctcctttgtgcgctctataatgcagtctcttgataactttttgcactgtaggtccgttaaggttagaagaaggctactttggtgtctattttctcttccataaaaaaagcctgactccacttcccgcgtttactgattactagcgaagctgcgggtgcattttttcaagataaaggcatccccgattatattctataccgatgtggattgcgcatactttgtgaacagaaagtgatagcgttgatgattcttcattggtcagaaaattatgaacggtttcttctattttgtctctatatactacgtataggaaatgtttacattttcgtattgttttcgattcactctatgaatagttcttactacaatttttttgtctaaagagtaatactagagataaacataaaaaatgtagaggtcgagtttagatgcaagttcaaggagcgaaaggtggatgggtaggttatatagggatatagcacagagatatatagcaaagagatacttttgagcaatgtttgtggaagcggtattcgcaatgggaagctccaccccggttgataatcagaaaagccccaaaaacaggaagattgtataagcaaatatttaaattgtaaacgttaatattttgttaaaattcgcgttaaatttttgttaaatcagctcattttttaacgaatagcccgaaatcggcaaaatcccttataaatcaaaagaatagaccgagatagggttgagtgttgttccagtttccaacaagagtccactattaaagaacgtggactccaacgtcaaagggcgaaaaagggtctatcagggcgatggcccactacgtgaaccatcaccctaatcaagttttttggggtcgaggtgccgtaaagcagtaaatcggaagggtaaacggatgcccccatttagagcttgacggggaaagccggcgaacgtggcgagaaaggaagggaagaaagcgaaaggagcgggggctagggcggtgggaagtgtaggggtcacgctgggcgtaaccaccacacccgccgcgcttaatggggcgctacagggcgcgtggggatgatccactagtacggattagaagccgccgagcgggtgacagccctccgaaggaagactctcctccgtgcgtcctcgtcttcaccggtcgcgttcctgaaacgcagatgtgcctcgcgccgcactgctccgaacaataaagattctacaatactagcttttatggttatgaagaggaaaaattggcagtaacctggccccacaaaccttcaaatgaacgaatcaaattaacaaccataggatgataatgcgattagttttttagccttatttctggggtaattaatcagcgaagcgatgatttttgatctattaacagatatataaatgcaaaaactgcataaccactttaactaatactttcaacattttcggtttgtattacttcttattcaaatgtaataaaagtatcaacaaaaaattgttaatatacctctatactttaacgtcaaggagaaaaaaccccggatcggactactagcagctgtaatacgactcactatagggaatattaagcttaaacaatggaaggttttggtgctaagtccgttgaagaattggatgttggtgatttggaatctgctggtttggaaccatctgaagccttgcatttttaccaagaattgcaagttgcattgcaaagagctggtttcggtaagttggaatctatttggagattggtgtcccaatctttgttgactccaagacatccacatgcattgcaccaattgatgtactactctatctacaagaactgggacgaattgcaatgtggtccaccaccatattggtttccatctttggaatttgctaggtccacttctatcggtcaattattggaagctagaggtaatgagttgttgggtaacaaggcttacgttgatccaattgcttctttcaccaacttctacaagttctccgttcaacacccagaaattttctggtctattgccttcgaaaagttgtccttgcatttctctgttgagccaaagcaaatggttgattcctctgattcttctagaccagctggtaaatggttgccaggtgctgttttgaatattgctcaatgttgtttgttgccaaagccatctattggtaagaccgatgattccattgccatcatttggagagatgaaggtggtgatgatttgccaccatctactatgaagttgtccgaattgagacatcacgtttctagagttgctttctcattgcaagctgctggttttcaaagaggtgatagaattgctatcgatatgccaatgcatatccatgccgttattatctacttggccattattttggctggttgcgttgttgtttctatcgctgattctttcgtttcctctgaaattgctgctagattggctatttctaaggccaagggtattttcacccaagatgttatagttagaggtggtaaggccatcccattatactctagagttttgggtgctaaaccaccaaaagctgttgttttgccatctgatggtaaatccgttagagtcccaatcagaaatcaagatgtttcctgggaagaatttttcgctaatggtaacggtacaaacagatccggtgatgaatttccagctgttcaattgccagttgaatcttggaccaatatcttgttctcttctggtactactgctgaacctaaagctattccttggaatcaaactaccccaatgagatgtgctgctgattcttgggctcattttgacttgcaagctggtgatatctactgttggccaactaatttgggttggatggttggtccttacattatttctgcttgtttgttgtctggtgctactatggcattatacaatggttctccattgggtagatctttcggtagatttgttcaagatgccagagttaccattttgggtactgttccatctatggttaagacctggaaaaaggttaactgcatggattctttggactggtcctctattagatcttttggtactacaggtgaagcctcctctattgatgatgatttgtggttgtctgctagagcttggtataagccaattttggaatgttgtggtggtactgaattgggttctgcttttttacatggttccttgttgcaaccacaagcctttgctgctttttctactccatctttgactaccgctttcgttttgttggatgattctggtagaccatacccagatgatcaaccatgttctggtgaaattgctttgttcccaaagttgttgggtgcttcttacactttgttgaatgccgatcatcacaaggtttactttgaaggtatgccagtcatcaacggtattcaattgagaaggcatggtgacgtttttgaaagaatggctggtggtttttacaaggctaaaggtagagctgatgataccatgaatttgggtggtgttaaggtttcctccgttgaaattgaaagagtctgtaataccgcccactcttctgttttggaaactgctgctattgctatgccacaaggtaaaggtggtggtccagataatttgatagttgctgctgttttaaagggtgctttgccaccaggtgaaaatcatccagaaatgttgaagaggattttctccaaagccttgcacgataatttgaaccctttgttcaaagttcacgccgttgttttgttgccagaatttccaagaactgcctccaacaagattatgagaagagttttgagagcccaaatggccagatctaaattgctcgagcatgcatctagagggccgcatcatgtaattagttatgtcacgcttacattcacgccctccccccacatccgctctaaccgaaaaggaaggagttagacaacctgaagtctaggtccctatttatttttttatagttatgttagtattaagaacgttatttatatttcaaatttttcttttttttctgtacagacgcgtgtacgcatgtaacattatactgaaaaccttgcttgagaaggttttgggacgctcgaaggctttaatttgcggccctgcattaatgaatcggccaacgcgcggggagaggcggtttgcgtattgggcgctcttccgcttcctcgctcactgactcgctgcgctcggtcgttcggctgcggcgagcggtatcagctcactcaaaggcggtaatacggttatccacagaatcaggggataacgcaggaaagaacatgtgagcaaaaggccagcaaaagcccaggaaccgtaaaaaggccgcgttgctggcgtttttccataggctccgcccccctgacgagcatcacaaaaatcgacgctcaagtcagaggtggcgaaacccgacaggactataaagataccaggcgtttccccctggaagctccctcgtgcgctctcctgttccgaccctgccgcttaccggatacctgtccgcctttctcccttcgggaagcgtggcgctttctcatagctcacgctgtaggtatctcagttcggtgtaggtcgttcgctccaagctgggctgtgtgcacgaaccccccgttcagcccgaccgctgcgccttatccggtaactatcgtcttgagtccaacccggtaagacacgacttatcgccactggcagcagccactggtaacaggattagcagagcgaggtatgtaggcggtgctacagagttcttgaagtggtggcctaactacggctacactagaaggacagtatttggtatctgcgctctgctgaagccagttaccttcggaaaaagagttggtagctcttgatccggcaaacaaaccaccgctggtagcggtggtttttttgtttgcaagcagcagattacgcgcagaaaaaaaggatctcaagaagatcctttgatcttttctacggggtctgacgctcagtggaacgaaaactcacgttaagggattttggtcatgagattatcaaaaaggatcttcacctagatccttttaaattaaaaatgaagttttaaatcaatctaaagtatatatgagtaaacttggtctgacagttaccaatgcttaatcagtgaggcacctatctcagcgatctgtctatttcgttcatccatagttgcctgactccccgtcgtgtagataactacgatacgggagcgcttaccatctggccccagtgctgcaatgataccgcgagacccacgctcaccggctccagatttatcagcaataaaccagccagccggaagggccgagcgcagaagtggtcctgcaactttatccgcctccattcagtctattaattgttgccgggaagctagagtaagtagttcgccagttaatagtttgcgcaacgttgttggcattgctacaggcatcgtggtgtcactctcgtcgtttggtatggcttcattcagctccggttcccaacgatcaaggcgagttacatgatcccccatgttgtgcaaaaaagcggttagctccttcggtcctccgatcgttgtcagaagtaagttggccgcagtgttatcactcatggttatggcagcactgcataattctcttactgtcatgccatccgtaagatgcttttctgtgactggtgagtactcaaccaagtcattctgagaatagtgtatgcggcgaccgagttgctcttgcccggcgtcaatacgggataatagtgtatcacatagcagaactttaaaagtgctcatcattggaaaacgttcttcggggcgaaaactctcaaggatcttaccgctgttgagatccagttcgatgtaacccactcgtgcacccaactgatcttcagcatcttttactttcaccagcgtttctgggtgagcaaaaacaggaaggcaaaatgccgcaaaaaagggaataagggcgacacggaaatgttgaatactcatactcttcctttttcaatgggtaataactgatataattaaattgaagctctaatttgtgagtttagtatacatgcatttacttataatacagttttttagttttgctggccgcatcttctcaaatatgcttcccagcctgcttttctgtaacgttcaccctctaccttagcatcccttccctttgcaaatagtcctcttccaacaataataatgtcagatcctgtagagaccacatcatccacggttctatactgttgacccaatgcgtctcccttgtcatctaaacccacaccgggtgtcataatcaaccaatcgtaaccttcatctcttccacccatgtctctttgagcaataaagccgataacaaaatctttgtcgctcttcgcaatgtcaacagtacccttagtatattctccagtagatagggagcccttgcatgacaattctgctaacatcaaaaggcctctaggttcctttgttacttcttctgccgcctgcttcaaaccgctaacaatacctgggcccaccacaccgtgtgcattcgtaatgtctgcccattctgctattctgtatacacccgcagagtactgcaatttgactgtattaccaatgtcagcaaattttctgtcttcg

SEQ ID NO: 361 - DNA, 7981 bp, Artificial Sequence; identical to SEQ ID NO: 360
  PLAS460

SEQ ID NO: 362 - DNA, 7417 bp, Artificial Sequence
  PLAS461
aagagtaaaaaattgtacttggcggataatgcctttagcggcttaactgtgccctccatggaaaaatcagtcaagatatccacatgtgtttttagtaaacaaattttgggacctaatgcttcaactaactccagtaattccttggtggtacgaacatccaatgaagcacacaagtttgtttgcttttcgtgcatgatattaaatagcttggcagcaacaggactaggatgagtagcagcacgttccttatatgtagctttcgacatgatttatcttcgtttcctgcaggtttttgttctgtgcagttgggttaagaatactgggcaatttcatgtttcttcaacactacatatgcgtatatataccaatctaagtctgtgctccttccttcgttcttccttctgttcggagattaccgaatcaaaaaaatttcaaagaaaccgaaatcaaaaaaaagaataaaaaaaaaatgatgaattgaattgaaaagctagcttatcgatgataagctgtcaaagatgagaattaattccacggactatagactatactagatactccgtctactgtacgatacacttccgctcaggtccttgtcctttaacgaggccttaccactcttttgttactctattgatccagctcagcaaaggcagtgtgatctaagattctatcttcgcgatgtagtaaaactagctagaccgagaaagagactagaaatgcaaaaggcacttctacaatggctgccatcattattatccgatgtgacgctgcagcttctcaatgatattcgaatacgctttgaggagatacagcctaatatccgacaaactgttttacagatttacgatcgtacttgttacccatcattgaattttgaacatccgaacctgggagttttccctgaaacagatagtatatttgaacctgtataataatatatagtctagcgctttacggaagacaatgtatgtatttcggttcctggagaaactattgcatctattgcataggtaatcttgcacgtcgcatccccggttcattttctgcgtttccatcttgcacttcaatagcatatctttgttaacgaagcatctgtgcttcattttgtagaacaaaaatgcaacgcgagagcgctaatttttcaaacaaagaatctgagctgcatttttacagaacagaaatgcaacgcgaaagcgctattttaccaacgaagaatctgtgcttcatttttgtaaaacaaaaatgcaacgcgacgagagcgctaatttttcaaacaaagaatctgagctgcatttttacagaacagaaatgcaacgcgagagcgctattttaccaacaaagaatctatacttcttttttgttctacaaaaatgcatcccgagagcgctatttttctaacaaagcatcttagattactttttttctcctttgtgcgctctataatgcagtctcttgataactttttgcactgtaggtccgttaaggttagaagaaggctactttggtgtctattttctcttccataaaaaaagcctgactccacttcccgcgtttactgattactagcgaagctgcgggtgcattttttcaagataaaggcatccccgattatattctataccgatgtggattgcgcatactttgtgaacagaaagtgatagcgttgatgattcttcattggtcagaaaattatgaacggtttcttctattttgtctctatatactacgtataggaaatgtttacattttcgtattgttttcgattcactctatgaatagttcttactacaatttttttgtctaaagagtaatactagagataaacataaaaaatgtagaggtcgagtttagatgcaagttcaaggagcgaaaggtggatgggtaggttatatagggatatagcacagagatatatagcaaagagatacttttgagcaatgtttgtggaagcggtattcgcaatgggaagctccaccccggttgataatcagaaaagccccaaaaacaggaagattgtataagcaaatatttaaattgtaaacgttaatattttgttaaaattcgcgttaaatttttgttaaatcagctcattttttaacgaatagcccgaaatcggcaaaatcccttataaatcaaaagaatagaccgagatagggttgagtgttgttccagtttccaacaagagtccactattaaagaacgtggactccaacgtcaaagggcgaaaaagggtctatcagggcgatggcccactacgtgaaccatcaccctaatcaagttttttggggtcgaggtgccgtaaagcagtaaatcggaagggtaaacggatgcccccatttagagcttgacggggaaagccggcgaacgtggcgagaaaggaagggaagaaagcgaaaggagcgggggctagggcggtgggaagtgtaggggtcacgctgggcgtaaccaccacacccgccgcgcttaatggggcgctacagggcgcgtggggatgatccactagtacggattagaagccgccgagcgggtgacagccctccgaaggaagactctcctccgtgcgtcctcgtcttcaccggtcgcgttcctgaaacgcagatgtgcctcgcgccgcactgctccgaacaataaagattctacaatactagcttttatggttatgaagaggaaaaattggcagtaacctggccccacaaaccttcaaatgaacgaatcaaattaacaaccataggatgataatgcgattagttttttagccttatttctggggtaattaatcagcgaagcgatgatttttgatctattaacagatatataaatgcaaaaactgcataaccactttaactaatactttcaacattttcggtttgtattacttcttattcaaatgtaataaaagtatcaacaaaaaattgttaatatacctctatactttaacgtcaaggagaaaaaaccccggatcggactactagcagctgtaatacgactcactatagggaatattaagcttaaacaatggaaaagtctggttatggtagggatggtgtttttagatctttaagaccaccattggttttgccaaaggatcacaatttgtccatggtgtctttcgtgttcagaaactcttcttcctatccacaaaaaccagccttgattgattctgataccaacgaaactttgtccttcagccaattcaagtccatggttatcaaagtttcccacggttttttgaacttgggtgttcaaaagaacgatgtcgttttgattttcgccccaaactctattcatgttccagtttgttttttgggtatcgttgcttctggtgctattgctactacttctaacccattatacaccgtgtctgaattgtccaagcaagttaaggattctaacccaaagttgatcgttactgttccagagttgttcgaaaaggttaagggttttaacttgccaaccattttgatcggtccaaactctgaagattctagcccattgaaatctagagctaaggttttgaccttccacgatttggttactttgtctggtccagtttctgatttcccaatggttgatttcaagcaatctgatactgctgccttgttgtattcttctggtactactggtatgtccaagggtgttgttttgtctcacaaaaactttatcgccagctctttgatggttaccatggaacaagatcaagctggtgaaatgcataacgttttcttgtgtttcttgccaatgttccacgttttcggtttggctattattacctacgctcaattgcaaagaggtaacaccgttatttctatggccagattcgatttggagaagatcttgaaggatgtcgaaaagtacaaggttacccatttgtgggttgttccaccagttattttggctttgactaagaactccatcgtcaagaagtacgacttgtcctccttgaaacatattggttctggtgctgctccattgggtaaagatttgatggaagaatgtgctaagatcgttccacatggtatagttgctcaaggttatggtatgactgaaacctgtggtatcgtttctgttgaagatacaagaggtggtaagagacatactggttctgctggtatgttatcttctggtgttgaagctcaaatcgtttccgttgatactttgaaaccattgccaccaaatcagttgggtgaaatttgggttagaggtccaaatatgatgcagggttactttaacaatccaagagctaccaagttgaccatcgataagaaaggttgggttcatactggtgatttgggttacttcgatgaagatggtcacttgtatgttgtcgacaggatcaaagaattgatcaagtacaagggtttccaagttgctccagctgaattggaaggtttgttggtttctcatccagaaatcttggatgccgttgttattccatttccagatgctgatgctggtgaagttccagttgcttatgttgttagatctccaaactctagcttgaccgaagatgatgtcaagaagtttattgctggtcaagttgcctctttcaagagattgagaaaggttaccttcatcaactccgttccaaaatctgcttctggtaagatcttgagaagagaattgatccaaaaggtcaggtccaacatcctcgagcatgcatctagagggccgcatcatgtaattagttatgtcacgcttacattcacgccctccccccacatccgctctaaccgaaaaggaaggagttagacaacctgaagtctaggtccctatttatttttttatagttatgttagtattaagaacgttatttatatttcaaatttttcttttttttctgtacagacgcgtgtacgcatgtaacattatactgaaaaccttgcttgagaaggttttgggacgctcgaaggctttaatttgcggccctgcattaatgaatcggccaacgcgcggggagaggcggtttgcgtattgggcgctcttccgcttcctcgctcactgactcgctgcgctcggtcgttcggctgcggcgagcggtatcagctcactcaaaggcggtaatacggttatccacagaatcaggggataacgcaggaaagaacatgtgagcaaaaggccagcaaaagcccaggaaccgtaaaaaggccgcgttgctggcgtttttccataggctccgcccccctgacgagcatcacaaaaatcgacgctcaagtcagaggtggcgaaacccgacaggactataaagataccaggcgtttccccctggaagctccctcgtgcgctctcctgttccgaccctgccgcttaccggatacctgtccgcctttctcccttcgggaagcgtggcgctttctcatagctcacgctgtaggtatctcagttcggtgtaggtcgttcgctccaagctgggctgtgtgcacgaaccccccgttcagcccgaccgctgcgccttatccggtaactatcgtcttgagtccaacccggtaagacacgacttatcgccactggcagcagccactggtaacaggattagcagagcgaggtatgtaggcggtgctacagagttcttgaagtggtggcctaactacggctacactagaaggacagtatttggtatctgcgctctgctgaagccagttaccttcggaaaaagagttggtagctcttgatccggcaaacaaaccaccgctggtagcggtggtttttttgtttgcaagcagcagattacgcgcagaaaaaaaggatctcaagaagatcctttgatcttttctacggggtctgacgctcagtggaacgaaaactcacgttaagggattttggtcatgagattatcaaaaaggatcttcacctagatccttttaaattaaaaatgaagttttaaatcaatctaaagtatatatgagtaaacttggtctgacagttaccaatgcttaatcagtgaggcacctatctcagcgatctgtctatttcgttcatccatagttgcctgactccccgtcgtgtagataactacgatacgggagcgcttaccatctggccccagtgctgcaatgataccgcgagacccacgctcaccggctccagatttatcagcaataaaccagccagccggaagggccgagcgcagaagtggtcctgcaactttatccgcctccattcagtctattaattgttgccgggaagctagagtaagtagttcgccagttaatagtttgcgcaacgttgttggcattgctacaggcatcgtggtgtcactctcgtcgtttggtatggcttcattcagctccggttcccaacgatcaaggcgagttacatgatcccccatgttgtgcaaaaaagcggttagctccttcggtcctccgatcgttgtcagaagtaagttggccgcagtgttatcactcatggttatggcagcactgcataattctcttactgtcatgccatccgtaagatgcttttctgtgactggtgagtactcaaccaagtcattctgagaatagtgtatgcggcgaccgagttgctcttgcccggcgtcaatacgggataatagtgtatcacatagcagaactttaaaagtgctcatcattggaaaacgttcttcggggcgaaaactctcaaggatcttaccgctgttgagatccagttcgatgtaacccactcgtgcacccaactgatcttcagcatcttttactttcaccagcgtttctgggtgagcaaaaacaggaaggcaaaatgccgcaaaaaagggaataagggcgacacggaaatgttgaatactcatactcttcctttttcaatgggtaataactgatataattaaattgaagctctaatttgtgagtttagtatacatgcatttacttataatacagttttttagttttgctggccgcatcttctcaaatatgcttcccagcctgcttttctgtaacgttcaccctctaccttagcatcccttccctttgcaaatagtcctcttccaacaataataatgtcagatcctgtagagaccacatcatccacggttctatactgttgacccaatgcgtctcccttgtcatctaaacccacaccgggtgtcataatcaaccaatcgtaaccttcatctcttccacccatgtctctttgagcaataaagccgataacaaaatctttgtcgctcttcgcaatgtcaacagtacccttagtatattctccagtagatagggagcccttgcatgacaattctgctaacatcaaaaggcctctaggttcctttgttacttcttctgccgcctgcttcaaaccgctaacaatacctgggcccaccacaccgtgtgcattcgtaatgtctgcccattctgctattctgtatacacccgcagagtactgcaatttgactgtattaccaatgtcagcaaattttctgtcttcg

SEQ ID NO: 363 - DNA, 7429 bp, Artificial Sequence
  PLAS462
aagagtaaaaaattgtacttggcggataatgcctttagcggcttaactgtgccctccatggaaaaatcagtcaagatatccacatgtgtttttagtaaacaaattttgggacctaatgcttcaactaactccagtaattccttggtggtacgaacatccaatgaagcacacaagtttgtttgcttttcgtgcatgatattaaatagcttggcagcaacaggactaggatgagtagcagcacgttccttatatgtagctttcgacatgatttatcttcgtttcctgcaggtttttgttctgtgcagttgggttaagaatactgggcaatttcatgtttcttcaacactacatatgcgtatatataccaatctaagtctgtgctccttccttcgttcttccttctgttcggagattaccgaatcaaaaaaatttcaaagaaaccgaaatcaaaaaaaagaataaaaaaaaaatgatgaattgaattgaaaagctagcttatcgatgataagctgtcaaagatgagaattaattccacggactatagactatactagatactccgtctactgtacgatacacttccgctcaggtccttgtcctttaacgaggccttaccactcttttgttactctattgatccagctcagcaaaggcagtgtgatctaagattctatcttcgcgatgtagtaaaactagctagaccgagaaagagactagaaatgcaaaaggcacttctacaatggctgccatcattattatccgatgtgacgctgcagcttctcaatgatattcgaatacgctttgaggagatacagcctaatatccgacaaactgttttacagatttacgatcgtacttgttacccatcattgaattttgaacatccgaacctgggagttttccctgaaacagatagtatatttgaacctgtataataatatatagtctagcgctttacggaagacaatgtatgtatttcggttcctggagaaactattgcatctattgcataggtaatcttgcacgtcgcatccccggttcattttctgcgtttccatcttgcacttcaatagcatatctttgttaacgaagcatctgtgcttcattttgtagaacaaaaatgcaacgcgagagcgctaatttttcaaacaaagaatctgagctgcatttttacagaacagaaatgcaacgcgaaagcgctattttaccaacgaagaatctgtgcttcatttttgtaaaacaaaaatgcaacgcgacgagagcgctaatttttcaaacaaagaatctgagctgcatttttacagaacagaaatgcaacgcgagagcgctattttaccaacaaagaatctatacttcttttttgttctacaaaaatgcatcccgagagcgctatttttctaacaaagcatcttagattactttttttctcctttgtgcgctctataatgcagtctcttgataactttttgcactgtaggtccgttaaggttagaagaaggctactttggtgtctattttctcttccataaaaaaagcctgactccacttcccgcgtttactgattactagcgaagctgcgggtgcattttttcaagataaaggcatccccgattatattctataccgatgtggattgcgcatactttgtgaacagaaagtgatagcgttgatgattcttcattggtcagaaaattatgaacggtttcttctattttgtctctatatactacgtataggaaatgtttacattttcgtattgttttcgattcactctatgaatagttcttactacaatttttttgtctaaagagtaatactagagataaacataaaaaatgtagaggtcgagtttagatgcaagttcaaggagcgaaaggtggatgggtaggttatatagggatatagcacagagatatatagcaaagagatacttttgagcaatgtttgtggaagcggtattcgcaatgggaagctccaccccggttgataatcagaaaagccccaaaaacaggaagattgtataagcaaatatttaaattgtaaacgttaatattttgttaaaattcgcgttaaatttttgttaaatcagctcattttttaacgaatagcccgaaatcggcaaaatcccttataaatcaaaagaatagaccgagatagggttgagtgttgttccagtttccaacaagagtccactattaaagaacgtggactccaacgtcaaagggcgaaaaagggtctatcagggcgatggcccactacgtgaaccatcaccctaatcaagttttttggggtcgaggtgccgtaaagcagtaaatcggaagggtaaacggatgcccccatttagagcttgacggggaaagccggcgaacgtggcgagaaaggaagggaagaaagcgaaaggagcgggggctagggcggtgggaagtgtaggggtcacgctgggcgtaaccaccacacccgccgcgcttaatggggcgctacagggcgcgtggggatgatccactagtacggattagaagccgccgagcgggtgacagccctccgaaggaagactctcctccgtgcgtcctcgtcttcaccggtcgcgttcctgaaacgcagatgtgcctcgcgccgcactgctccgaacaataaagattctacaatactagcttttatggttatgaagaggaaaaattggcagtaacctggccccacaaaccttcaaatgaacgaatcaaattaacaaccataggatgataatgcgattagttttttagccttatttctggggtaattaatcagcgaagcgatgatttttgatctattaacagatatataaatgcaaaaactgcataaccactttaactaatactttcaacattttcggtttgtattacttcttattcaaatgtaataaaagtatcaacaaaaaattgttaatatacctctatactttaacgtcaaggagaaaaaaccccggatcggactactagcagctgtaatacgactcactatagggaatattaagcttaaacaatggccttgggtcaaatgatgagaaatcaacttgttatcggtagtttagtagaacatgctgcaaggtaccacggagccagggaagtcgtatctgtcgagacttcaggggaggtgactaggtcctgttggaaagaggttgaattaagagcaagaaaacttgcttctgcattaggcaagatgggcttgacaccgagtgatagatgtgctacaattgcttggaacaatataaggcatttggaagtttattatgctgtctctggggctggaatggtgtgtcatacaatcaatccaagactgttcattgaacaaattacgtacgtgattaatcatgctgaggataaggttgtactgttggatgatacttttcttccaatcatcgctgagatacatggttctttgccaaaggtcaaggcttttgtgttgatggcgcacaacaatagtaatgcgtctgctcaaatgccagggttaattgcatacgaagatctgatcggacaaggagatgataactatatttggccagatgtagacgaaaatgaagcatcttcactatgctatacctcgggaaccaccggaaatccaaaaggtgttttatattcacacagatccactgtgttacattctatgacgacagccatgccagatacattaaatttgagtgctcgtgatactattctaccagttgttcctatgtttcacgtcaatgcatggggtactccatactcagctgcaatggtaggtgccaagttggtgttgccaggtcccgccttggacggtgcttctcttagtaagctaatcgcttcagaaggtgtgtcaatcgcactgggtgtaccagtggtgtggcaaggtttattggcagcacaagctggtaatggctcaaaatcacaatcgttaacaagagttgtcgtaggcgggtcggcttgtcctgcatcaatgattagagaatttaacgatatttatggagttgaagtcattcacgcttggggtatgacagaactgtctcctttcgggaccgccaacacgccacttgctcatcatgttgatttgagcccagatgagaaattgtcgctaaggaagtcacagggccgtcctccatacggggttgagttaaaaatcgtcaatgatgagggtataaggttgccggaggacggtagaagcaaaggaaatttgatggctcgtggtcattgggtgattaaggattacttccactcagacccaggttctacactatctgacggctggttctctacaggggacgtagctactattgattctgatggtttcatgactatctgtgatcgtgctaaagatataattaaatcgggaggtgaatggatatctacagtggaactggaatctatcgccatagcacatccacatattgtggacgccgctgtaattgcagctagacacgagaaatgggatgaaaggccgttgttaatagcggtcaaaagtccaaattctgaattgacaagtggcgaagtatgtaactattttgctgacaaagttgccagatggcaaattccagatgctgccatctttgttgaagagcttccaagaaatggtacaggtaaaattctgaagaatagattaagagagaagtacggcgatattctattaagatcctcatctagtgtctgtgaataactcgagcatgcatctagagggccgcatcatgtaattagttatgtcacgcttacattcacgccctccccccacatccgctctaaccgaaaaggaaggagttagacaacctgaagtctaggtccctatttatttttttatagttatgttagtattaagaacgttatttatatttcaaatttttcttttttttctgtacagacgcgtgtacgcatgtaacattatactgaaaaccttgcttgagaaggttttgggacgctcgaaggctttaatttgcggccctgcattaatgaatcggccaacgcgcggggagaggcggtttgcgtattgggcgctcttccgcttcctcgctcactgactcgctgcgctcggtcgttcggctgcggcgagcggtatcagctcactcaaaggcggtaatacggttatccacagaatcaggggataacgcaggaaagaacatgtgagcaaaaggccagcaaaagcccaggaaccgtaaaaaggccgcgttgctggcgtttttccataggctccgcccccctgacgagcatcacaaaaatcgacgctcaagtcagaggtggcgaaacccgacaggactataaagataccaggcgtttccccctggaagctccctcgtgcgctctcctgttccgaccctgccgcttaccggatacctgtccgcctttctcccttcgggaagcgtggcgctttctcatagctcacgctgtaggtatctcagttcggtgtaggtcgttcgctccaagctgggctgtgtgcacgaaccccccgttcagcccgaccgctgcgccttatccggtaactatcgtcttgagtccaacccggtaagacacgacttatcgccactggcagcagccactggtaacaggattagcagagcgaggtatgtaggcggtgctacagagttcttgaagtggtggcctaactacggctacactagaaggacagtatttggtatctgcgctctgctgaagccagttaccttcggaaaaagagttggtagctcttgatccggcaaacaaaccaccgctggtagcggtggtttttttgtttgcaagcagcagattacgcgcagaaaaaaaggatctcaagaagatcctttgatcttttctacggggtctgacgctcagtggaacgaaaactcacgttaagggattttggtcatgagattatcaaaaaggatcttcacctagatccttttaaattaaaaatgaagttttaaatcaatctaaagtatatatgagtaaacttggtctgacagttaccaatgcttaatcagtgaggcacctatctcagcgatctgtctatttcgttcatccatagttgcctgactccccgtcgtgtagataactacgatacgggagcgcttaccatctggccccagtgctgcaatgataccgcgagacccacgctcaccggctccagatttatcagcaataaaccagccagccggaagggccgagcgcagaagtggtcctgcaactttatccgcctccattcagtctattaattgttgccgggaagctagagtaagtagttcgccagttaatagtttgcgcaacgttgttggcattgctacaggcatcgtggtgtcactctcgtcgtttggtatggcttcattcagctccggttcccaacgatcaaggcgagttacatgatcccccatgttgtgcaaaaaagcggttagctccttcggtcctccgatcgttgtcagaagtaagttggccgcagtgttatcactcatggttatggcagcactgcataattctcttactgtcatgccatccgtaagatgcttttctgtgactggtgagtactcaaccaagtcattctgagaatagtgtatgcggcgaccgagttgctcttgcccggcgtcaatacgggataatagtgtatcacatagcagaactttaaaagtgctcatcattggaaaacgttcttcggggcgaaaactctcaaggatcttaccgctgttgagatccagttcgatgtaacccactcgtgcacccaactgatcttcagcatcttttactttcaccagcgtttctgggtgagcaaaaacaggaaggcaaaatgccgcaaaaaagggaataagggcgacacggaaatgttgaatactcatactcttcctttttcaatgggtaataactgatataattaaattgaagctctaatttgtgagtttagtatacatgcatttacttataatacagttttttagttttgctggccgcatcttctcaaatatgcttcccagcctgcttttctgtaacgttcaccctctaccttagcatcccttccctttgcaaatagtcctcttccaacaataataatgtcagatcctgtagagaccacatcatccacggttctatactgttgacccaatgcgtctcccttgtcatctaaacccacaccgggtgtcataatcaaccaatcgtaaccttcatctcttccacccatgtctctttgagcaataaagccgataacaaaatctttgtcgctcttcgcaatgtcaacagtacccttagtatattctccagtagatagggagcccttgcatgacaattctgctaacatcaaaaggcctctaggttcctttgttacttcttctgccgcctgcttcaaaccgctaacaatacctgggcccaccacaccgtgtgcattcgtaatgtctgcccattctgctattctgtatacacccgcagagtactgcaatttgactgtattaccaatgtcagcaaattttctgtcttcg

SEQ ID NO: 364 - DNA, 7522 bp, Artificial Sequence
  PLAS463
aagagtaaaaaattgtacttggcggataatgcctttagcggcttaactgtgccctccatggaaaaatcagtcaagatatccacatgtgtttttagtaaacaaattttgggacctaatgcttcaactaactccagtaattccttggtggtacgaacatccaatgaagcacacaagtttgtttgcttttcgtgcatgatattaaatagcttggcagcaacaggactaggatgagtagcagcacgttccttatatgtagctttcgacatgatttatcttcgtttcctgcaggtttttgttctgtgcagttgggttaagaatactgggcaatttcatgtttcttcaacactacatatgcgtatatataccaatctaagtctgtgctccttccttcgttcttccttctgttcggagattaccgaatcaaaaaaatttcaaagaaaccgaaatcaaaaaaaagaataaaaaaaaaatgatgaattgaattgaaaagctagcttatcgatgataagctgtcaaagatgagaattaattccacggactatagactatactagatactccgtctactgtacgatacacttccgctcaggtccttgtcctttaacgaggccttaccactcttttgttactctattgatccagctcagcaaaggcagtgtgatctaagattctatcttcgcgatgtagtaaaactagctagaccgagaaagagactagaaatgcaaaaggcacttctacaatggctgccatcattattatccgatgtgacgctgcagcttctcaatgatattcgaatacgctttgaggagatacagcctaatatccgacaaactgttttacagatttacgatcgtacttgttacccatcattgaattttgaacatccgaacctgggagttttccctgaaacagatagtatatttgaacctgtataataatatatagtctagcgctttacggaagacaatgtatgtatttcggttcctggagaaactattgcatctattgcataggtaatcttgcacgtcgcatccccggttcattttctgcgtttccatcttgcacttcaatagcatatctttgttaacgaagcatctgtgcttcattttgtagaacaaaaatgcaacgcgagagcgctaatttttcaaacaaagaatctgagctgcatttttacagaacagaaatgcaacgcgaaagcgctattttaccaacgaagaatctgtgcttcatttttgtaaaacaaaaatgcaacgcgacgagagcgctaatttttcaaacaaagaatctgagctgcatttttacagaacagaaatgcaacgcgagagcgctattttaccaacaaagaatctatacttcttttttgttctacaaaaatgcatcccgagagcgctatttttctaacaaagcatcttagattactttttttctcctttgtgcgctctataatgcagtctcttgataactttttgcactgtaggtccgttaaggttagaagaaggctactttggtgtctattttctcttccataaaaaaagcctgactccacttcccgcgtttactgattactagcgaagctgcgggtgcattttttcaagataaaggcatccccgattatattctataccgatgtggattgcgcatactttgtgaacagaaagtgatagcgttgatgattcttcattggtcagaaaattatgaacggtttcttctattttgtctctatatactacgtataggaaatgtttacattttcgtattgttttcgattcactctatgaatagttcttactacaatttttttgtctaaagagtaatactagagataaacataaaaaatgtagaggtcgagtttagatgcaagttcaaggagcgaaaggtggatgggtaggttatatagggatatagcacagagatatatagcaaagagatacttttgagcaatgtttgtggaagcggtattcgcaatgggaagctccaccccggttgataatcagaaaagccccaaaaacaggaagattgtataagcaaatatttaaattgtaaacgttaatattttgttaaaattcgcgttaaatttttgttaaatcagctcattttttaacgaatagcccgaaatcggcaaaatcccttataaatcaaaagaatagaccgagatagggttgagtgttgttccagtttccaacaagagtccactattaaagaacgtggactccaacgtcaaagggcgaaaaagggtctatcagggcgatggcccactacgtgaaccatcaccctaatcaagttttttggggtcgaggtgccgtaaagcagtaaatcggaagggtaaacggatgcccccatttagagcttgacggggaaagccggcgaacgtggcgagaaaggaagggaagaaagcgaaaggagcgggggctagggcggtgggaagtgtaggggtcacgctgggcgtaaccaccacacccgccgcgcttaatggggcgctacagggcgcgtggggatgatccactagtacggattagaagccgccgagcgggtgacagccctccgaaggaagactctcctccgtgcgtcctcgtcttcaccggtcgcgttcctgaaacgcagatgtgcctcgcgccgcactgctccgaacaataaagattctacaatactagcttttatggttatgaagaggaaaaattggcagtaacctggccccacaaaccttcaaatgaacgaatcaaattaacaaccataggatgataatgcgattagttttttagccttatttctggggtaattaatcagcgaagcgatgatttttgatctattaacagatatataaatgcaaaaactgcataaccactttaactaatactttcaacattttcggtttgtattacttcttattcaaatgtaataaaagtatcaacaaaaaattgttaatatacctctatactttaacgtcaaggagaaaaaaccccggatcggactactagcagctgtaatacgactcactatagggaatattaagcttaaacaatggcacactggttaagaaaggtgcaaggtttgtgcactctttggggtactcagatgtcttcgagaacgttatatattaattctagacaattagtatcgttacaatggggccatcaggaagtcccagccaagttcaattttgcttcggatgtactggatcattgggctgacatggagaaagcaggcaaacgtttaccatctcccgcactatggtgggttaacggtaagggaaaagagctgatgtggaattttagggaactgtctgagaatagtcaacaagcagcaaatatcttgtcaggtgcttgcggtttacaaagaggtgatagggtggcagttatgttaccaagagttccagaatggtggttagttattctaggttgtattcgtgctggcttgatcttcatgcccggtactattcaaatgaagagtacagatattctttataggttacaaatgagtaaagcaaaggcaatcgtggctggtgatgaagttattcaggaggttgatacagttgctagtgagtgtccttcattaaggatcaagttgttagtatctgaaaaatcatgtgacggttggttaaacttcaagaaattattaaatgaagcttccacaactcaccattgtgtggaaacaggttctcaagaggcttctgctatttacttcacatcaggtacctccggattgcccaagatggccgagcattcatacagttcgttaggtttaaaagctaaaatggatgcaggctggacaggcttacaggcatctgatattatgtggacaatctctgataccggctggattttaaacattttaggatccttattagaaagttggacattgggcgcttgcacgtttgtgcacttattaccaaagtttgaccctttagtgattctgaaaactttatcctcctacccgattaaaagtatgatgggcgcacctatagtctataggatgctgttacaacaagacttgtcaagctataaattcccacatctacaaaactgtttagccggtggtgaaagtttgcttccagaaacattggagaattggagagctcagactggcttggatataagagagttctatggtcaaacagaaactggactgacgtgcatggtttctaagactatgaagataaaaccaggctacatgggaacagcggcgtcgtgttatgatgtgcaggtcatagatgataaaggtaatgttctaccaccaggaaccgaaggagacataggtataagggtgaagccgataagaccaattgggattttctcaggctatgtcgaaaatccagataaaacggctgctaacatcagaggggacttttggctgttaggagacagaggaattaaagatgaagatgggtattttcagtttatgggtagagccgatgacatcataaacagctctggatatagaattggtccttctgaagttgaaaatgcattgatgaaacatccagctgtggtcgagactgcagtcatctcttcccccgatccagtgagaggtgaagtcgtaaaggcttttgttattctggcgtcacaattcctatctcatgaccccgaacaactaacgaaagaacttcagcaacatgttaaatccgttactgccccctacaaatatcctaggaaaatcgaatttgtattaaacttaccaaaaactgtaacaggtaagatacaaagaactaaattacgtgataaagaatggaagatgagtggaaaggctagagcacaatagctcgagcatgcatctagagggccgcatcatgtaattagttatgtcacgcttacattcacgccctccccccacatccgctctaaccgaaaaggaaggagttagacaacctgaagtctaggtccctatttatttttttatagttatgttagtattaagaacgttatttatatttcaaatttttcttttttttctgtacagacgcgtgtacgcatgtaacattatactgaaaaccttgcttgagaaggttttgggacgctcgaaggctttaatttgcggccctgcattaatgaatcggccaacgcgcggggagaggcggtttgcgtattgggcgctcttccgcttcctcgctcactgactcgctgcgctcggtcgttcggctgcggcgagcggtatcagctcactcaaaggcggtaatacggttatccacagaatcaggggataacgcaggaaagaacatgtgagcaaaaggccagcaaaagcccaggaaccgtaaaaaggccgcgttgctggcgtttttccataggctccgcccccctgacgagcatcacaaaaatcgacgctcaagtcagaggtggcgaaacccgacaggactataaagataccaggcgtttccccctggaagctccctcgtgcgctctcctgttccgaccctgccgcttaccggatacctgtccgcctttctcccttcgggaagcgtggcgctttctcatagctcacgctgtaggtatctcagttcggtgtaggtcgttcgctccaagctgggctgtgtgcacgaaccccccgttcagcccgaccgctgcgccttatccggtaactatcgtcttgagtccaacccggtaagacacgacttatcgccactggcagcagccactggtaacaggattagcagagcgaggtatgtaggcggtgctacagagttcttgaagtggtggcctaactacggctacactagaaggacagtatttggtatctgcgctctgctgaagccagttaccttcggaaaaagagttggtagctcttgatccggcaaacaaaccaccgctggtagcggtggtttttttgtttgcaagcagcagattacgcgcagaaaaaaaggatctcaagaagatcctttgatcttttctacggggtctgacgctcagtggaacgaaaactcacgttaagggattttggtcatgagattatcaaaaaggatcttcacctagatccttttaaattaaaaatgaagttttaaatcaatctaaagtatatatgagtaaacttggtctgacagttaccaatgcttaatcagtgaggcacctatctcagcgatctgtctatttcgttcatccatagttgcctgactccccgtcgtgtagataactacgatacgggagcgcttaccatctggccccagtgctgcaatgataccgcgagacccacgctcaccggctccagatttatcagcaataaaccagccagccggaagggccgagcgcagaagtggtcctgcaactttatccgcctccattcagtctattaattgttgccgggaagctagagtaagtagttcgccagttaatagtttgcgcaacgttgttggcattgctacaggcatcgtggtgtcactctcgtcgtttggtatggcttcattcagctccggttcccaacgatcaaggcgagttacatgatcccccatgttgtgcaaaaaagcggttagctccttcggtcctccgatcgttgtcagaagtaagttggccgcagtgttatcactcatggttatggcagcactgcataattctcttactgtcatgccatccgtaagatgcttttctgtgactggtgagtactcaaccaagtcattctgagaatagtgtatgcggcgaccgagttgctcttgcccggcgtcaatacgggataatagtgtatcacatagcagaactttaaaagtgctcatcattggaaaacgttcttcggggcgaaaactctcaaggatcttaccgctgttgagatccagttcgatgtaacccactcgtgcacccaactgatcttcagcatcttttactttcaccagcgtttctgggtgagcaaaaacaggaaggcaaaatgccgcaaaaaagggaataagggcgacacggaaatgttgaatactcatactcttcctttttcaatgggtaataactgatataattaaattgaagctctaatttgtgagtttagtatacatgcatttacttataatacagttttttagttttgctggccgcatcttctcaaatatgcttcccagcctgcttttctgtaacgttcaccctctaccttagcatcccttccctttgcaaatagtcctcttccaacaataataatgtcagatcctgtagagaccacatcatccacggttctatactgttgacccaatgcgtctcccttgtcatctaaacccacaccgggtgtcataatcaaccaatcgtaaccttcatctcttccacccatgtctctttgagcaataaagccgataacaaaatctttgtcgctcttcgcaatgtcaacagtacccttagtatattctccagtagatagggagcccttgcatgacaattctgctaacatcaaaaggcctctaggttcctttgttacttcttctgccgcctgcttcaaaccgctaacaatacctgggcccaccacaccgtgtgcattcgtaatgtctgcccattctgctattctgtatacacccgcagagtactgcaatttgactgtattaccaatgtcagcaaattttctgtcttcg

SEQ ID NO: 365 - DNA, 7549 bp, Artificial Sequence
  PLAS464
aagagtaaaaaattgtacttggcggataatgcctttagcggcttaactgtgccctccatggaaaaatcagtcaagatatccacatgtgtttttagtaaacaaattttgggacctaatgcttcaactaactccagtaattccttggtggtacgaacatccaatgaagcacacaagtttgtttgcttttcgtgcatgatattaaatagcttggcagcaacaggactaggatgagtagcagcacgttccttatatgtagctttcgacatgatttatcttcgtttcctgcaggtttttgttctgtgcagttgggttaagaatactgggcaatttcatgtttcttcaacactacatatgcgtatatataccaatctaagtctgtgctccttccttcgttcttccttctgttcggagattaccgaatcaaaaaaatttcaaagaaaccgaaatcaaaaaaaagaataaaaaaaaaatgatgaattgaattgaaaagctagcttatcgatgataagctgtcaaagatgagaattaattccacggactatagactatactagatactccgtctactgtacgatacacttccgctcaggtccttgtcctttaacgaggccttaccactcttttgttactctattgatccagctcagcaaaggcagtgtgatctaagattctatcttcgcgatgtagtaaaactagctagaccgagaaagagactagaaatgcaaaaggcacttctacaatggctgccatcattattatccgatgtgacgctgcagcttctcaatgatattcgaatacgctttgaggagatacagcctaatatccgacaaactgttttacagatttacgatcgtacttgttacccatcattgaattttgaacatccgaacctgggagttttccctgaaacagatagtatatttgaacctgtataataatatatagtctagcgctttacggaagacaatgtatgtatttcggttcctggagaaactattgcatctattgcataggtaatcttgcacgtcgcatccccggttcattttctgcgtttccatcttgcacttcaatagcatatctttgttaacgaagcatctgtgcttcattttgtagaacaaaaatgcaacgcgagagcgctaatttttcaaacaaagaatctgagctgcatttttacagaacagaaatgcaacgcgaaagcgctattttaccaacgaagaatctgtgcttcatttttgtaaaacaaaaatgcaacgcgacgagagcgctaatttttcaaacaaagaatctgagctgcatttttacagaacagaaatgcaacgcgagagcgctattttaccaacaaagaatctatacttcttttttgttctacaaaaatgcatcccgagagcgctatttttctaacaaagcatcttagattactttttttctcctttgtgcgctctataatgcagtctcttgataactttttgcactgtaggtccgttaaggttagaagaaggctactttggtgtctattttctcttccataaaaaaagcctgactccacttcccgcgtttactgattactagcgaagctgcgggtgcattttttcaagataaaggcatccccgattatattctataccgatgtggattgcgcatactttgtgaacagaaagtgatagcgttgatgattcttcattggtcagaaaattatgaacggtttcttctattttgtctctatatactacgtataggaaatgtttacattttcgtattgttttcgattcactctatgaatagttcttactacaatttttttgtctaaagagtaatactagagataaacataaaaaatgtagaggtcgagtttagatgcaagttcaaggagcgaaaggtggatgggtaggttatatagggatatagcacagagatatatagcaaagagatacttttgagcaatgtttgtggaagcggtattcgcaatgggaagctccaccccggttgataatcagaaaagccccaaaaacaggaagattgtataagcaaatatttaaattgtaaacgttaatattttgttaaaattcgcgttaaatttttgttaaatcagctcattttttaacgaatagcccgaaatcggcaaaatcccttataaatcaaaagaatagaccgagatagggttgagtgttgttccagtttccaacaagagtccactattaaagaacgtggactccaacgtcaaagggcgaaaaagggtctatcagggcgatggcccactacgtgaaccatcaccctaatcaagttttttggggtcgaggtgccgtaaagcagtaaatcggaagggtaaacggatgcccccatttagagcttgacggggaaagccggcgaacgtggcgagaaaggaagggaagaaagcgaaaggagcgggggctagggcggtgggaagtgtaggggtcacgctgggcgtaaccaccacacccgccgcgcttaatggggcgctacagggcgcgtggggatgatccactagtacggattagaagccgccgagcgggtgacagccctccgaaggaagactctcctccgtgcgtcctcgtcttcaccggtcgcgttcctgaaacgcagatgtgcctcgcgccgcactgctccgaacaataaagattctacaatactagcttttatggttatgaagaggaaaaattggcagtaacctggccccacaaaccttcaaatgaacgaatcaaattaacaaccataggatgataatgcgattagttttttagccttatttctggggtaattaatcagcgaagcgatgatttttgatctattaacagatatataaatgcaaaaactgcataaccactttaactaatactttcaacattttcggtttgtattacttcttattcaaatgtaataaaagtatcaacaaaaaattgttaatatacctctatactttaacgtcaaggagaaaaaaccccggatcggactactagcagctgtaatacgactcactatagggaatattaagcttaaacaatggcactggctcgtgtgactagaaagatgttaagacacgctaagtgttttcaaaggcttgcgatcttcggttccgtcagagctttgcataaggacaatagaacagcaaccccacaaaacttttcaaattatgaaagtatgaagcaagatttcaagctgggaattcctgaatacttcaactttgcaaaagacgttcttgatcagtggacagataaagaaaaggctggtaagaaaccctcaaatccagctttttggtggattaacagaaacggagaggagatgagatggtcctttgaagaacttggttcattgtcccgtaagttcgcaaatatcctgtccgaagcatgctctctacaaaggggagatagagtcatattgattttgccaagagttccagagtggtggttagcaaatgtagcatgcctacgtactgggaccgttttaatcccagggacaactcagctgacgcaaaaagatattctttatagactacagtcttcaaaggcaaattgtataatcactaacgatgttcttgcacctgctgtggacgccgtcgcaagcaaatgtgagaacttacatagtaagcttatcgtttctgaaaatagcagggagggttggggaaatctgaaagaattaatgaaacacgcctcggactctcacacttgtgttaaaacaaaacataatgaaattatggcgatcttctttacctctggtacatccggttatccaaaaatgacggcacacacacattcttcttttggcttaggattatccgtcaatggtagattttggcttgatttgacgccttctgatgttatgtggaatacatcagatactggctgggcgaaatctgcttggagctctgttttttccccatggattcaaggagcttgtgtgtttacgcatcacctacctagattcgaaccaacgtctattttacaaactttgtctaaatatccgattactgtcttttgttcagcaccgactgtttacagaatgttagttcagaacgatatcacatcctataagtttaaatctcttaagcattgcgtctccgccggggagccaataacaccggacgtcactgaaaagtggagaaataaaactggtttggatatctacgaaggttatggtcaaacagaaactgtcttaatttgtgggaatttcaaaggtatgaaaattaagcctggtagtatgggtaagccatcaccagctttcgatgttaagatagtggatgttaatggtaacgtccttccacccggccaggagggtgatataggtattcaagtattgccgaacaggccatttggcctttttacacactacgtcgataatccgtcgaaaacggcatcaacgctaagaggtaacttctatattactggagatcgtgggtatatggataaggatggttatttttggtttgtagcaagagctgacgatgttattttgagctcaggctatagaattggtccctttgaagttgaaaatgctttaaatgaacatccatcagtagcagaatcagctgttgtatcgtcccccgatccaataaggggtgaagttgttaaagctttcgttgttttgaatcccgattacaagtctcacgaccaagaacaattaatcaaggagatccaagaacacgtgaagaaaacaactgctccttacaaatatccgagaaaagtcgaattcatccaagagttaccaaaaacaattagcggtaaaacaaaaagaaacgagctgagaaaaaaagaatggaagaccatatagctcgagcatgcatctagagggccgcatcatgtaattagttatgtcacgcttacattcacgccctccccccacatccgctctaaccgaaaaggaaggagttagacaacctgaagtctaggtccctatttatttttttatagttatgttagtattaagaacgttatttatatttcaaatttttcttttttttctgtacagacgcgtgtacgcatgtaacattatactgaaaaccttgcttgagaaggttttgggacgctcgaaggctttaatttgcggccctgcattaatgaatcggccaacgcgcggggagaggcggtttgcgtattgggcgctcttccgcttcctcgctcactgactcgctgcgctcggtcgttcggctgcggcgagcggtatcagctcactcaaaggcggtaatacggttatccacagaatcaggggataacgcaggaaagaacatgtgagcaaaaggccagcaaaagcccaggaaccgtaaaaaggccgcgttgctggcgtttttccataggctccgcccccctgacgagcatcacaaaaatcgacgctcaagtcagaggtggcgaaacccgacaggactataaagataccaggcgtttccccctggaagctccctcgtgcgctctcctgttccgaccctgccgcttaccggatacctgtccgcctttctcccttcgggaagcgtggcgctttctcatagctcacgctgtaggtatctcagttcggtgtaggtcgttcgctccaagctgggctgtgtgcacgaaccccccgttcagcccgaccgctgcgccttatccggtaactatcgtcttgagtccaacccggtaagacacgacttatcgccactggcagcagccactggtaacaggattagcagagcgaggtatgtaggcggtgctacagagttcttgaagtggtggcctaactacggctacactagaaggacagtatttggtatctgcgctctgctgaagccagttaccttcggaaaaagagttggtagctcttgatccggcaaacaaaccaccgctggtagcggtggtttttttgtttgcaagcagcagattacgcgcagaaaaaaaggatctcaagaagatcctttgatcttttctacggggtctgacgctcagtggaacgaaaactcacgttaagggattttggtcatgagattatcaaaaaggatcttcacctagatccttttaaattaaaaatgaagttttaaatcaatctaaagtatatatgagtaaacttggtctgacagttaccaatgcttaatcagtgaggcacctatctcagcgatctgtctatttcgttcatccatagttgcctgactccccgtcgtgtagataactacgatacgggagcgcttaccatctggccccagtgctgcaatgataccgcgagacccacgctcaccggctccagatttatcagcaataaaccagccagccggaagggccgagcgcagaagtggtcctgcaactttatccgcctccattcagtctattaattgttgccgggaagctagagtaagtagttcgccagttaatagtttgcgcaacgttgttggcattgctacaggcatcgtggtgtcactctcgtcgtttggtatggcttcattcagctccggttcccaacgatcaaggcgagttacatgatcccccatgttgtgcaaaaaagcggttagctccttcggtcctccgatcgttgtcagaagtaagttggccgcagtgttatcactcatggttatggcagcactgcataattctcttactgtcatgccatccgtaagatgcttttctgtgactggtgagtactcaaccaagtcattctgagaatagtgtatgcggcgaccgagttgctcttgcccggcgtcaatacgggataatagtgtatcacatagcagaactttaaaagtgctcatcattggaaaacgttcttcggggcgaaaactctcaaggatcttaccgctgttgagatccagttcgatgtaacccactcgtgcacccaactgatcttcagcatcttttactttcaccagcgtttctgggtgagcaaaaacaggaaggcaaaatgccgcaaaaaagggaataagggcgacacggaaatgttgaatactcatactcttcctttttcaatgggtaataactgatataattaaattgaagctctaatttgtgagtttagtatacatgcatttacttataatacagttttttagttttgctggccgcatcttctcaaatatgcttcccagcctgcttttctgtaacgttcaccctctaccttagcatcccttccctttgcaaatagtcctcttccaacaataataatgtcagatcctgtagagaccacatcatccacggttctatactgttgacccaatgcgtctcccttgtcatctaaacccacaccgggtgtcataatcaaccaatcgtaaccttcatctcttccacccatgtctctttgagcaataaagccgataacaaaatctttgtcgctcttcgcaatgtcaacagtacccttagtatattctccagtagatagggagcccttgcatgacaattctgctaacatcaaaaggcctctaggttcctttgttacttcttctgccgcctgcttcaaaccgctaacaatacctgggcccaccacaccgtgtgcattcgtaatgtctgcccattctgctattctgtatacacccgcagagtactgcaatttgactgtattaccaatgtcagcaaattttctgtcttcg

SEQ ID NO: 366 - DNA, 7507 bp, Artificial Sequence
  PLAS465
aagagtaaaaaattgtacttggcggataatgcctttagcggcttaactgtgccctccatggaaaaatcagtcaagatatccacatgtgtttttagtaaacaaattttgggacctaatgcttcaactaactccagtaattccttggtggtacgaacatccaatgaagcacacaagtttgtttgcttttcgtgcatgatattaaatagcttggcagcaacaggactaggatgagtagcagcacgttccttatatgtagctttcgacatgatttatcttcgtttcctgcaggtttttgttctgtgcagttgggttaagaatactgggcaatttcatgtttcttcaacactacatatgcgtatatataccaatctaagtctgtgctccttccttcgttcttccttctgttcggagattaccgaatcaaaaaaatttcaaagaaaccgaaatcaaaaaaaagaataaaaaaaaaatgatgaattgaattgaaaagctagcttatcgatgataagctgtcaaagatgagaattaattccacggactatagactatactagatactccgtctactgtacgatacacttccgctcaggtccttgtcctttaacgaggccttaccactcttttgttactctattgatccagctcagcaaaggcagtgtgatctaagattctatcttcgcgatgtagtaaaactagctagaccgagaaagagactagaaatgcaaaaggcacttctacaatggctgccatcattattatccgatgtgacgctgcagcttctcaatgatattcgaatacgctttgaggagatacagcctaatatccgacaaactgttttacagatttacgatcgtacttgttacccatcattgaattttgaacatccgaacctgggagttttccctgaaacagatagtatatttgaacctgtataataatatatagtctagcgctttacggaagacaatgtatgtatttcggttcctggagaaactattgcatctattgcataggtaatcttgcacgtcgcatccccggttcattttctgcgtttccatcttgcacttcaatagcatatctttgttaacgaagcatctgtgcttcattttgtagaacaaaaatgcaacgcgagagcgctaatttttcaaacaaagaatctgagctgcatttttacagaacagaaatgcaacgcgaaagcgctattttaccaacgaagaatctgtgcttcatttttgtaaaacaaaaatgcaacgcgacgagagcgctaatttttcaaacaaagaatctgagctgcatttttacagaacagaaatgcaacgcgagagcgctattttaccaacaaagaatctatacttcttttttgttctacaaaaatgcatcccgagagcgctatttttctaacaaagcatcttagattactttttttctcctttgtgcgctctataatgcagtctcttgataactttttgcactgtaggtccgttaaggttagaagaaggctactttggtgtctattttctcttccataaaaaaagcctgactccacttcccgcgtttactgattactagcgaagctgcgggtgcattttttcaagataaaggcatccccgattatattctataccgatgtggattgcgcatactttgtgaacagaaagtgatagcgttgatgattcttcattggtcagaaaattatgaacggtttcttctattttgtctctatatactacgtataggaaatgtttacattttcgtattgttttcgattcactctatgaatagttcttactacaatttttttgtctaaagagtaatactagagataaacataaaaaatgtagaggtcgagtttagatgcaagttcaaggagcgaaaggtggatgggtaggttatatagggatatagcacagagatatatagcaaagagatacttttgagcaatgtttgtggaagcggtattcgcaatgggaagctccaccccggttgataatcagaaaagccccaaaaacaggaagattgtataagcaaatatttaaattgtaaacgttaatattttgttaaaattcgcgttaaatttttgttaaatcagctcattttttaacgaatagcccgaaatcggcaaaatcccttataaatcaaaagaatagaccgagatagggttgagtgttgttccagtttccaacaagagtccactattaaagaacgtggactccaacgtcaaagggcgaaaaagggtctatcagggcgatggcccactacgtgaaccatcaccctaatcaagttttttggggtcgaggtgccgtaaagcagtaaatcggaagggtaaacggatgcccccatttagagcttgacggggaaagccggcgaacgtggcgagaaaggaagggaagaaagcgaaaggagcgggggctagggcggtgggaagtgtaggggtcacgctgggcgtaaccaccacacccgccgcgcttaatggggcgctacagggcgcgtggggatgatccactagtacggattagaagccgccgagcgggtgacagccctccgaaggaagactctcctccgtgcgtcctcgtcttcaccggtcgcgttcctgaaacgcagatgtgcctcgcgccgcactgctccgaacaataaagattctacaatactagcttttatggttatgaagaggaaaaattggcagtaacctggccccacaaaccttcaaatgaacgaatcaaattaacaaccataggatgataatgcgattagttttttagccttatttctggggtaattaatcagcgaagcgatgatttttgatctattaacagatatataaatgcaaaaactgcataaccactttaactaatactttcaacattttcggtttgtattacttcttattcaaatgtaataaaagtatcaacaaaaaattgttaatatacctctatactttaacgtcaaggagaaaaaaccccggatcggactactagcagctgtaatacgactcactatagggaatattaagcttaaacaatggctgataatttggttctgtgtgaagccaacaatgtcccacttactcccatcactttcttaaaaagagcaagtgaatgctatcctaatcgtactagtattatctatggccaaacacgtttcacatggccccaaacttacgatagatgttgtagacttgcagcatcgcttttatcattaaatatcacgcgtaatgacgtggtgtcgatactagccccaaacgttccagctatgtacgagatgcatttctctgttccaatgacgggagcagtgttgaatccaataaataccaggcttgatgcgaagactattgctattattttgagacacgcagagcctaagatcttgttcgtcgattacgaatttgctccgttaatacaagaagtgttaagattgattccaacctatcagtcccaaccacaccccagaattatcttgattaatgaaatagattccacaactaaacccttttccaaagaattagattatgaaggtttgattagaaagggagaacccacgccttcatcttctgcatcaatgttccgtgttcacaatgagcacgatcccatatctttgaactatacttcaggtactacagctgatcctaaaggagttgtgatctctcaccagggtgcttacctatctgctttgagttccattattggatgggaaatgggtatttttcccgtatacctgtggactttaccaatgttccattgtaatggttggacacatacctggtctgttgctgctaggggtggcactaatgtttgcatcaggcacgtaactgcacctgaaatttataaaaatatcgaactgcatggtgttacgcatatgtcatgtgttcccactgtcttcagattcctattggaaggctcgaggactgaccagagccccaaaagcagcccagttcaagtgttaacaggcggtagttctccgcctgcggttcttattaaaaaggtggaacaattggggttccatgtcatgcacggttacgggttgactgaagctacaggacccgttttgttttgtgagtggcaagatgaatggaacaaattgcctgaacatcagcaaattgaattacagcaaagacaaggcgtcagaaatttgactttggctgatgtcgatgtcaagaacactaaaacattggaatctgttccacgtgatggcaagacaatgggtgagatagtcatcaagggttcttcgcttatgaagggttatttaaagaatccaaaggctacttctgaagcattcaaacatggttggcttaataccggtgatatcggtgtgattcatccagatggttatgtcgaaatcaaagacaggtccaaggatataattataagtggaggcgaaaatatctcttcgattgaagtagaaaaagtgttgtatatgtaccaagaagtcctggaagccgcagtggttgcaatgccccatcctctgtggggtgaaacaccctgcgcatttgtagttttgaagaaaggggaggaaggactggtcacatccgaaggagatttaataaagtactgtagagagaatatgcctcattttatgtgtcctaagaaagtcgtgtttttccaggaattgccaaagaatagcaatggtaagatactaaaatctaagttaagagacattgccaaagctttggtcgtcagggaggatgatgcaggtagcaaaaaagttcatcagaggtcaattgaacatgtatcgtcaaggctttaactcgagcatgcatctagagggccgcatcatgtaattagttatgtcacgcttacattcacgccctccccccacatccgctctaaccgaaaaggaaggagttagacaacctgaagtctaggtccctatttatttttttatagttatgttagtattaagaacgttatttatatttcaaatttttcttttttttctgtacagacgcgtgtacgcatgtaacattatactgaaaaccttgcttgagaaggttttgggacgctcgaaggctttaatttgcggccctgcattaatgaatcggccaacgcgcggggagaggcggtttgcgtattgggcgctcttccgcttcctcgctcactgactcgctgcgctcggtcgttcggctgcggcgagcggtatcagctcactcaaaggcggtaatacggttatccacagaatcaggggataacgcaggaaagaacatgtgagcaaaaggccagcaaaagcccaggaaccgtaaaaaggccgcgttgctggcgtttttccataggctccgcccccctgacgagcatcacaaaaatcgacgctcaagtcagaggtggcgaaacccgacaggactataaagataccaggcgtttccccctggaagctccctcgtgcgctctcctgttccgaccctgccgcttaccggatacctgtccgcctttctcccttcgggaagcgtggcgctttctcatagctcacgctgtaggtatctcagttcggtgtaggtcgttcgctccaagctgggctgtgtgcacgaaccccccgttcagcccgaccgctgcgccttatccggtaactatcgtcttgagtccaacccggtaagacacgacttatcgccactggcagcagccactggtaacaggattagcagagcgaggtatgtaggcggtgctacagagttcttgaagtggtggcctaactacggctacactagaaggacagtatttggtatctgcgctctgctgaagccagttaccttcggaaaaagagttggtagctcttgatccggcaaacaaaccaccgctggtagcggtggtttttttgtttgcaagcagcagattacgcgcagaaaaaaaggatctcaagaagatcctttgatcttttctacggggtctgacgctcagtggaacgaaaactcacgttaagggattttggtcatgagattatcaaaaaggatcttcacctagatccttttaaattaaaaatgaagttttaaatcaatctaaagtatatatgagtaaacttggtctgacagttaccaatgcttaatcagtgaggcacctatctcagcgatctgtctatttcgttcatccatagttgcctgactccccgtcgtgtagataactacgatacgggagcgcttaccatctggccccagtgctgcaatgataccgcgagacccacgctcaccggctccagatttatcagcaataaaccagccagccggaagggccgagcgcagaagtggtcctgcaactttatccgcctccattcagtctattaattgttgccgggaagctagagtaagtagttcgccagttaatagtttgcgcaacgttgttggcattgctacaggcatcgtggtgtcactctcgtcgtttggtatggcttcattcagctccggttcccaacgatcaaggcgagttacatgatcccccatgttgtgcaaaaaagcggttagctccttcggtcctccgatcgttgtcagaagtaagttggccgcagtgttatcactcatggttatggcagcactgcataattctcttactgtcatgccatccgtaagatgcttttctgtgactggtgagtactcaaccaagtcattctgagaatagtgtatgcggcgaccgagttgctcttgcccggcgtcaatacgggataatagtgtatcacatagcagaactttaaaagtgctcatcattggaaaacgttcttcggggcgaaaactctcaaggatcttaccgctgttgagatccagttcgatgtaacccactcgtgcacccaactgatcttcagcatcttttactttcaccagcgtttctgggtgagcaaaaacaggaaggcaaaatgccgcaaaaaagggaataagggcgacacggaaatgttgaatactcatactcttcctttttcaatgggtaataactgatataattaaattgaagctctaatttgtgagtttagtatacatgcatttacttataatacagttttttagttttgctggccgcatcttctcaaatatgcttcccagcctgcttttctgtaacgttcaccctctaccttagcatcccttccctttgcaaatagtcctcttccaacaataataatgtcagatcctgtagagaccacatcatccacggttctatactgttgacccaatgcgtctcccttgtcatctaaacccacaccgggtgtcataatcaaccaatcgtaaccttcatctcttccacccatgtctctttgagcaataaagccgataacaaaatctttgtcgctcttcgcaatgtcaacagtacccttagtatattctccagtagatagggagcccttgcatgacaattctgctaacatcaaaaggcctctaggttcctttgttacttcttctgccgcctgcttcaaaccgctaacaatacctgggcccaccacaccgtgtgcattcgtaatgtctgcccattctgctattctgtatacacccgcagagtactgcaatttgactgtattaccaatgtcagcaaattttctgtcttcg

SEQ ID NO: 367 - DNA, 7522 bp, Artificial Sequence
  PLAS466
aagagtaaaaaattgtacttggcggataatgcctttagcggcttaactgtgccctccatggaaaaatcagtcaagatatccacatgtgtttttagtaaacaaattttgggacctaatgcttcaactaactccagtaattccttggtggtacgaacatccaatgaagcacacaagtttgtttgcttttcgtgcatgatattaaatagcttggcagcaacaggactaggatgagtagcagcacgttccttatatgtagctttcgacatgatttatcttcgtttcctgcaggtttttgttctgtgcagttgggttaagaatactgggcaatttcatgtttcttcaacactacatatgcgtatatataccaatctaagtctgtgctccttccttcgttcttccttctgttcggagattaccgaatcaaaaaaatttcaaagaaaccgaaatcaaaaaaaagaataaaaaaaaaatgatgaattgaattgaaaagctagcttatcgatgataagctgtcaaagatgagaattaattccacggactatagactatactagatactccgtctactgtacgatacacttccgctcaggtccttgtcctttaacgaggccttaccactcttttgttactctattgatccagctcagcaaaggcagtgtgatctaagattctatcttcgcgatgtagtaaaactagctagaccgagaaagagactagaaatgcaaaaggcacttctacaatggctgccatcattattatccgatgtgacgctgcagcttctcaatgatattcgaatacgctttgaggagatacagcctaatatccgacaaactgttttacagatttacgatcgtacttgttacccatcattgaattttgaacatccgaacctgggagttttccctgaaacagatagtatatttgaacctgtataataatatatagtctagcgctttacggaagacaatgtatgtatttcggttcctggagaaactattgcatctattgcataggtaatcttgcacgtcgcatccccggttcattttctgcgtttccatcttgcacttcaatagcatatctttgttaacgaagcatctgtgcttcattttgtagaacaaaaatgcaacgcgagagcgctaatttttcaaacaaagaatctgagctgcatttttacagaacagaaatgcaacgcgaaagcgctattttaccaacgaagaatctgtgcttcatttttgtaaaacaaaaatgcaacgcgacgagagcgctaatttttcaaacaaagaatctgagctgcatttttacagaacagaaatgcaacgcgagagcgctattttaccaacaaagaatctatacttcttttttgttctacaaaaatgcatcccgagagcgctatttttctaacaaagcatcttagattactttttttctcctttgtgcgctctataatgcagtctcttgataactttttgcactgtaggtccgttaaggttagaagaaggctactttggtgtctattttctcttccataaaaaaagcctgactccacttcccgcgtttactgattactagcgaagctgcgggtgcattttttcaagataaaggcatccccgattatattctataccgatgtggattgcgcatactttgtgaacagaaagtgatagcgttgatgattcttcattggtcagaaaattatgaacggtttcttctattttgtctctatatactacgtataggaaatgtttacattttcgtattgttttcgattcactctatgaatagttcttactacaatttttttgtctaaagagtaatactagagataaacataaaaaatgtagaggtcgagtttagatgcaagttcaaggagcgaaaggtggatgggtaggttatatagggatatagcacagagatatatagcaaagagatacttttgagcaatgtttgtggaagcggtattcgcaatgggaagctccaccccggttgataatcagaaaagccccaaaaacaggaagattgtataagcaaatatttaaattgtaaacgttaatattttgttaaaattcgcgttaaatttttgttaaatcagctcattttttaacgaatagcccgaaatcggcaaaatcccttataaatcaaaagaatagaccgagatagggttgagtgttgttccagtttccaacaagagtccactattaaagaacgtggactccaacgtcaaagggcgaaaaagggtctatcagggcgatggcccactacgtgaaccatcaccctaatcaagttttttggggtcgaggtgccgtaaagcagtaaatcggaagggtaaacggatgcccccatttagagcttgacggggaaagccggcgaacgtggcgagaaaggaagggaagaaagcgaaaggagcgggggctagggcggtgggaagtgtaggggtcacgctgggcgtaaccaccacacccgccgcgcttaatggggcgctacagggcgcgtggggatgatccactagtacggattagaagccgccgagcgggtgacagccctccgaaggaagactctcctccgtgcgtcctcgtcttcaccggtcgcgttcctgaaacgcagatgtgcctcgcgccgcactgctccgaacaataaagattctacaatactagcttttatggttatgaagaggaaaaattggcagtaacctggccccacaaaccttcaaatgaacgaatcaaattaacaaccataggatgataatgcgattagttttttagccttatttctggggtaattaatcagcgaagcgatgatttttgatctattaacagatatataaatgcaaaaactgcataaccactttaactaatactttcaacattttcggtttgtattacttcttattcaaatgtaataaaagtatcaacaaaaaattgttaatatacctctatactttaacgtcaaggagaaaaaaccccggatcggactactagcagctgtaatacgactcactatagggaatattaagcttaaacaatggctcactggctacgtaaggtccaaggcctatgtaccttgtggggaactcaaatgtcgtcaagaacattgtacattaattctaggcaattggtcagtttgcaatggggccaccaagaagtcccagctaagttcaacttcgctagtgatgttttggaccattgggccgacatggaaaaagccgggaaaagattaccatcaccggctttgtggtgggttaatggcaaaggtaaagaattgatgtggaattttagggaattatccgaaaacagccagcaggccgcaaatgtgctttctggagcatgcggtttacagaggggtgatagagttgctgtggtcttacccagggtccccgaatggtggttagttatcttgggttgtataagggccggactaatatttatgccaggcactattcagatgaaatctactgatatcttgtacagactacaaatgagtaaggctaaagctattgtagcgggcgatgaggttatacaggaagtggatactgtagcctctgaatgtcctagtttaaggataaagttattagtttccgagaagagttgcgatggatggttgaacttcaaaaaactattgaacgaggcttcaacaacccatcactgcgttgagacaggtagccaagaggcttctgcgatttatttcaccagcggtacctcaggacttccaaaaatggctgaacactcgtactccagcttggggttaaaggccaagatggatgctggctggacgggtttacaagcaagtgacataatgtggaccatctctgatactggatggattctgaatattttgtgttcccttatggaaccctgggcattgggtgcttgtacctttgtacatctgctaccgaagtttgatccattggttatactaaagactttgtcctcatatccaatcaagtctatgatgggtgctccaatagtttacaggatgttgctacaacaggatttgagctcctataaattcccccatttgcaaaactgcgtgactgtaggtgaatctttgctaccagaaacactggagaattggagagctcagactggtttagatataagagagtcctatggccaaacagaaactgggttaacatgcatggtttctaagacgatgaagattaaacccggttacatgggtactgccgctagttgctacgatgtgcaaatcatagatgacaaaggcaatgttttgcctcctggtaccgagggagatattggaattagagttaaaccaattagaccaatcggaatcttttctggttacgtcgacaatccagacaaaaccgccgctaacatcagaggtgacttttggttattaggtgataggggcataaaagacgaagatggttatttccaatttatgggtcgtgctaatgatataatcaatagctctggttatcgtatcgggccaagtgaagtagagaatgccttgatggaacacccggccgtggtggaaacagcggttatttcatctccagacccagttagaggtgaggtcgtcaaagcatttgttgtgcttgcttcgcagttcttgtcccatgacccagagcaattgacgaaggagttgcagcaacatgtaaaaagcgttaccgcgccttacaagtatcctagaaagattgaatttgtattgaatttaccaaaaactgttactggtaagatacagagagccaagcttagggataaggaatggaagatgtccggtaaagcaagagcgcaataactcgagcatgcatctagagggccgcatcatgtaattagttatgtcacgcttacattcacgccctccccccacatccgctctaaccgaaaaggaaggagttagacaacctgaagtctaggtccctatttatttttttatagttatgttagtattaagaacgttatttatatttcaaatttttcttttttttctgtacagacgcgtgtacgcatgtaacattatactgaaaaccttgcttgagaaggttttgggacgctcgaaggctttaatttgcggccctgcattaatgaatcggccaacgcgcggggagaggcggtttgcgtattgggcgctcttccgcttcctcgctcactgactcgctgcgctcggtcgttcggctgcggcgagcggtatcagctcactcaaaggcggtaatacggttatccacagaatcaggggataacgcaggaaagaacatgtgagcaaaaggccagcaaaagcccaggaaccgtaaaaaggccgcgttgctggcgtttttccataggctccgcccccctgacgagcatcacaaaaatcgacgctcaagtcagaggtggcgaaacccgacaggactataaagataccaggcgtttccccctggaagctccctcgtgcgctctcctgttccgaccctgccgcttaccggatacctgtccgcctttctcccttcgggaagcgtggcgctttctcatagctcacgctgtaggtatctcagttcggtgtaggtcgttcgctccaagctgggctgtgtgcacgaaccccccgttcagcccgaccgctgcgccttatccggtaactatcgtcttgagtccaacccggtaagacacgacttatcgccactggcagcagccactggtaacaggattagcagagcgaggtatgtaggcggtgctacagagttcttgaagtggtggcctaactacggctacactagaaggacagtatttggtatctgcgctctgctgaagccagttaccttcggaaaaagagttggtagctcttgatccggcaaacaaaccaccgctggtagcggtggtttttttgtttgcaagcagcagattacgcgcagaaaaaaaggatctcaagaagatcctttgatcttttctacggggtctgacgctcagtggaacgaaaactcacgttaagggattttggtcatgagattatcaaaaaggatcttcacctagatccttttaaattaaaaatgaagttttaaatcaatctaaagtatatatgagtaaacttggtctgacagttaccaatgcttaatcagtgaggcacctatctcagcgatctgtctatttcgttcatccatagttgcctgactccccgtcgtgtagataactacgatacgggagcgcttaccatctggccccagtgctgcaatgataccgcgagacccacgctcaccggctccagatttatcagcaataaaccagccagccggaagggccgagcgcagaagtggtcctgcaactttatccgcctccattcagtctattaattgttgccgggaagctagagtaagtagttcgccagttaatagtttgcgcaacgttgttggcattgctacaggcatcgtggtgtcactctcgtcgtttggtatggcttcattcagctccggttcccaacgatcaaggcgagttacatgatcccccatgttgtgcaaaaaagcggttagctccttcggtcctccgatcgttgtcagaagtaagttggccgcagtgttatcactcatggttatggcagcactgcataattctcttactgtcatgccatccgtaagatgcttttctgtgactggtgagtactcaaccaagtcattctgagaatagtgtatgcggcgaccgagttgctcttgcccggcgtcaatacgggataatagtgtatcacatagcagaactttaaaagtgctcatcattggaaaacgttcttcggggcgaaaactctcaaggatcttaccgctgttgagatccagttcgatgtaacccactcgtgcacccaactgatcttcagcatcttttactttcaccagcgtttctgggtgagcaaaaacaggaaggcaaaatgccgcaaaaaagggaataagggcgacacggaaatgttgaatactcatactcttcctttttcaatgggtaataactgatataattaaattgaagctctaatttgtgagtttagtatacatgcatttacttataatacagttttttagttttgctggccgcatcttctcaaatatgcttcccagcctgcttttctgtaacgttcaccctctaccttagcatcccttccctttgcaaatagtcctcttccaacaataataatgtcagatcctgtagagaccacatcatccacggttctatactgttgacccaatgcgtctcccttgtcatctaaacccacaccgggtgtcataatcaaccaatcgtaaccttcatctcttccacccatgtctctttgagcaataaagccgataacaaaatctttgtcgctcttcgcaatgtcaacagtacccttagtatattctccagtagatagggagcccttgcatgacaattctgctaacatcaaaaggcctctaggttcctttgttacttcttctgccgcctgcttcaaaccgctaacaatacctgggcccaccacaccgtgtgcattcgtaatgtctgcccattctgctattctgtatacacccgcagagtactgcaatttgactgtattaccaatgtcagcaaattttctgtcttcg

SEQ ID NO: 368 - DNA, 7522 bp, Artificial Sequence
  PLAS467
aagagtaaaaaattgtacttggcggataatgcctttagcggcttaactgtgccctccatggaaaaatcagtcaagatatccacatgtgtttttagtaaacaaattttgggacctaatgcttcaactaactccagtaattccttggtggtacgaacatccaatgaagcacacaagtttgtttgcttttcgtgcatgatattaaatagcttggcagcaacaggactaggatgagtagcagcacgttccttatatgtagctttcgacatgatttatcttcgtttcctgcaggtttttgttctgtgcagttgggttaagaatactgggcaatttcatgtttcttcaacactacatatgcgtatatataccaatctaagtctgtgctccttccttcgttcttccttctgttcggagattaccgaatcaaaaaaatttcaaagaaaccgaaatcaaaaaaaagaataaaaaaaaaatgatgaattgaattgaaaagctagcttatcgatgataagctgtcaaagatgagaattaattccacggactatagactatactagatactccgtctactgtacgatacacttccgctcaggtccttgtcctttaacgaggccttaccactcttttgttactctattgatccagctcagcaaaggcagtgtgatctaagattctatcttcgcgatgtagtaaaactagctagaccgagaaagagactagaaatgcaaaaggcacttctacaatggctgccatcattattatccgatgtgacgctgcagcttctcaatgatattcgaatacgctttgaggagatacagcctaatatccgacaaactgttttacagatttacgatcgtacttgttacccatcattgaattttgaacatccgaacctgggagttttccctgaaacagatagtatatttgaacctgtataataatatatagtctagcgctttacggaagacaatgtatgtatttcggttcctggagaaactattgcatctattgcataggtaatcttgcacgtcgcatccccggttcattttctgcgtttccatcttgcacttcaatagcatatctttgttaacgaagcatctgtgcttcattttgtagaacaaaaatgcaacgcgagagcgctaatttttcaaacaaagaatctgagctgcatttttacagaacagaaatgcaacgcgaaagcgctattttaccaacgaagaatctgtgcttcatttttgtaaaacaaaaatgcaacgcgacgagagcgctaatttttcaaacaaagaatctgagctgcatttttacagaacagaaatgcaacgcgagagcgctattttaccaacaaagaatctatacttcttttttgttctacaaaaatgcatcccgagagcgctatttttctaacaaagcatcttagattactttttttctcctttgtgcgctctataatgcagtctcttgataactttttgcactgtaggtccgttaaggttagaagaaggctactttggtgtctattttctcttccataaaaaaagcctgactccacttcccgcgtttactgattactagcgaagctgcgggtgcattttttcaagataaaggcatccccgattatattctataccgatgtggattgcgcatactttgtgaacagaaagtgatagcgttgatgattcttcattggtcagaaaattatgaacggtttcttctattttgtctctatatactacgtataggaaatgtttacattttcgtattgttttcgattcactctatgaatagttcttactacaatttttttgtctaaagagtaatactagagataaacataaaaaatgtagaggtcgagtttagatgcaagttcaaggagcgaaaggtggatgggtaggttatatagggatatagcacagagatatatagcaaagagatacttttgagcaatgtttgtggaagcggtattcgcaatgggaagctccaccccggttgataatcagaaaagccccaaaaacaggaagattgtataagcaaatatttaaattgtaaacgttaatattttgttaaaattcgcgttaaatttttgttaaatcagctcattttttaacgaatagcccgaaatcggcaaaatcccttataaatcaaaagaatagaccgagatagggttgagtgttgttccagtttccaacaagagtccactattaaagaacgtggactccaacgtcaaagggcgaaaaagggtctatcagggcgatggcccactacgtgaaccatcaccctaatcaagttttttggggtcgaggtgccgtaaagcagtaaatcggaagggtaaacggatgcccccatttagagcttgacggggaaagccggcgaacgtggcgagaaaggaagggaagaaagcgaaaggagcgggggctagggcggtgggaagtgtaggggtcacgctgggcgtaaccaccacacccgccgcgcttaatggggcgctacagggcgcgtggggatgatccactagtacggattagaagccgccgagcgggtgacagccctccgaaggaagactctcctccgtgcgtcctcgtcttcaccggtcgcgttcctgaaacgcagatgtgcctcgcgccgcactgctccgaacaataaagattctacaatactagcttttatggttatgaagaggaaaaattggcagtaacctggccccacaaaccttcaaatgaacgaatcaaattaacaaccataggatgataatgcgattagttttttagccttatttctggggtaattaatcagcgaagcgatgatttttgatctattaacagatatataaatgcaaaaactgcataaccactttaactaatactttcaacattttcggtttgtattacttcttattcaaatgtaataaaagtatcaacaaaaaattgttaatatacctctatactttaacgtcaaggagaaaaaaccccggatcggactactagcagctgtaatacgactcactatagggaatattaagcttaaacaatggcacaatggctgatgagattcagaacgttgtgggggatccataaatcctttcacaatatccacccagcccccagccagttaagatgtagatctttatcagagtttggcgctccaaggtggaacgactatgaggtccctgaggagtttaattttgcatcgtatgttttagactattgggctcagaaagaaaaggaaggaaagcgtggtcctaatcccgcattctggtgggttaatggacaaggtgatgaggttaaatggtctttcagggagatgggggatttgactcgtagggttgctaacgtttttacgcaaacgtgtggtttacaacagggtgatcatctggctctgatgctaccaagggtaccagaatggtggttggtagcggttggctgtatgagaactgggatcatatttataccagcaactattcttttaaaggctaaagacattttatataggttacaattgtccaaggccaaaggaattgttactattgacgctctagcatctgaagtcgattccattgcgtctcaatgcccttcattgaaaactaagttgctagtatcagatcactccagagaaggttggttggacttcagatctttggtaaaatctgctagtccagaacacacttgcgttaaaagtaaaacactagacccaatggtaattttttttacgagtggaacgacgggatttcctaagatggcgaaacattcacatggtttagctctgcagccatctttccccggttcaaggaaattacgttctttgaaaacctctgatgtttcatggtgcttatccgattccggttggatagttgcgaccatttggactcttgttgaaccatggacggctggctgcactgtatttatccatcatcttcctcaatttgataccaaagttataatccagaccctacttaaatatccaattaatcacttttggggagtcagttcaatttaccgtatgatacttcagcaagatttcacatctatcagatttccagctttggaacattgttacacgggtggtgaagttgttcttccaaaggaccaagaagagtggaagaggaggacaggtttattattatatgaaaattacggccaaagcgaaacaggtcttatatgtgctacttattggggtatgaagatcaaacccgggtttatggggaaggccacacctccctatgatgttcaggttattgacgataaaggatctatcctaccccccaatactgaaggaaacattggtatacgtatcaagcctgtgaggcctgtcagtctattcatgtgttatgaaggtgatcctgaaaagacggccaaagtcgaatgtggagatttttacaatacaggggacagaggaaaaatggacgaggaaggttatatctgtttcttaggcagatcagacgatattattaacgccagtggttacaggataggtcccgctgaggttgaaagtgcactggtcgaacacccagctgttgctgaatcagcagttgtgggctctcccgatccaattagaggggaagtcgttaaagctttcattgttcttactccacaatttttgtcccacgataaggaccaactgacaaaagaacttcagcagcacgtaaagagtgttaccgcaccgtataaatatcctagaaaagtcgaatttgtgtcagagttacccaagaccataacagggaaaattgaacgtaaagaactgcgtaagaaggaaaccggtcaaatgtagctcgagcatgcatctagagggccgcatcatgtaattagttatgtcacgcttacattcacgccctccccccacatccgctctaaccgaaaaggaaggagttagacaacctgaagtctaggtccctatttatttttttatagttatgttagtattaagaacgttatttatatttcaaatttttcttttttttctgtacagacgcgtgtacgcatgtaacattatactgaaaaccttgcttgagaaggttttgggacgctcgaaggctttaatttgcggccctgcattaatgaatcggccaacgcgcggggagaggcggtttgcgtattgggcgctcttccgcttcctcgctcactgactcgctgcgctcggtcgttcggctgcggcgagcggtatcagctcactcaaaggcggtaatacggttatccacagaatcaggggataacgcaggaaagaacatgtgagcaaaaggccagcaaaagcccaggaaccgtaaaaaggccgcgttgctggcgtttttccataggctccgcccccctgacgagcatcacaaaaatcgacgctcaagtcagaggtggcgaaacccgacaggactataaagataccaggcgtttccccctggaagctccctcgtgcgctctcctgttccgaccctgccgcttaccggatacctgtccgcctttctcccttcgggaagcgtggcgctttctcatagctcacgctgtaggtatctcagttcggtgtaggtcgttcgctccaagctgggctgtgtgcacgaaccccccgttcagcccgaccgctgcgccttatccggtaactatcgtcttgagtccaacccggtaagacacgacttatcgccactggcagcagccactggtaacaggattagcagagcgaggtatgtaggcggtgctacagagttcttgaagtggtggcctaactacggctacactagaaggacagtatttggtatctgcgctctgctgaagccagttaccttcggaaaaagagttggtagctcttgatccggcaaacaaaccaccgctggtagcggtggtttttttgtttgcaagcagcagattacgcgcagaaaaaaaggatctcaagaagatcctttgatcttttctacggggtctgacgctcagtggaacgaaaactcacgttaagggattttggtcatgagattatcaaaaaggatcttcacctagatccttttaaattaaaaatgaagttttaaatcaatctaaagtatatatgagtaaacttggtctgacagttaccaatgcttaatcagtgaggcacctatctcagcgatctgtctatttcgttcatccatagttgcctgactccccgtcgtgtagataactacgatacgggagcgcttaccatctggccccagtgctgcaatgataccgcgagacccacgctcaccggctccagatttatcagcaataaaccagccagccggaagggccgagcgcagaagtggtcctgcaactttatccgcctccattcagtctattaattgttgccgggaagctagagtaagtagttcgccagttaatagtttgcgcaacgttgttggcattgctacaggcatcgtggtgtcactctcgtcgtttggtatggcttcattcagctccggttcccaacgatcaaggcgagttacatgatcccccatgttgtgcaaaaaagcggttagctccttcggtcctccgatcgttgtcagaagtaagttggccgcagtgttatcactcatggttatggcagcactgcataattctcttactgtcatgccatccgtaagatgcttttctgtgactggtgagtactcaaccaagtcattctgagaatagtgtatgcggcgaccgagttgctcttgcccggcgtcaatacgggataatagtgtatcacatagcagaactttaaaagtgctcatcattggaaaacgttcttcggggcgaaaactctcaaggatcttaccgctgttgagatccagttcgatgtaacccactcgtgcacccaactgatcttcagcatcttttactttcaccagcgtttctgggtgagcaaaaacaggaaggcaaaatgccgcaaaaaagggaataagggcgacacggaaatgttgaatactcatactcttcctttttcaatgggtaataactgatataattaaattgaagctctaatttgtgagtttagtatacatgcatttacttataatacagttttttagttttgctggccgcatcttctcaaatatgcttcccagcctgcttttctgtaacgttcaccctctaccttagcatcccttccctttgcaaatagtcctcttccaacaataataatgtcagatcctgtagagaccacatcatccacggttctatactgttgacccaatgcgtctcccttgtcatctaaacccacaccgggtgtcataatcaaccaatcgtaaccttcatctcttccacccatgtctctttgagcaataaagccgataacaaaatctttgtcgctcttcgcaatgtcaacagtacccttagtatattctccagtagatagggagcccttgcatgacaattctgctaacatcaaaaggcctctaggttcctttgttacttcttctgccgcctgcttcaaaccgctaacaatacctgggcccaccacaccgtgtgcattcgtaatgtctgcccattctgctattctgtatacacccgcagagtactgcaatttgactgtattaccaatgtcagcaaattttctgtcttcg

SEQ ID NO: 369 - DNA, 7129 bp, Artificial Sequence
  PLAS468
aagagtaaaaaattgtacttggcggataatgcctttagcggcttaactgtgccctccatggaaaaatcagtcaagatatccacatgtgtttttagtaaacaaattttgggacctaatgcttcaactaactccagtaattccttggtggtacgaacatccaatgaagcacacaagtttgtttgcttttcgtgcatgatattaaatagcttggcagcaacaggactaggatgagtagcagcacgttccttatatgtagctttcgacatgatttatcttcgtttcctgcaggtttttgttctgtgcagttgggttaagaatactgggcaatttcatgtttcttcaacactacatatgcgtatatataccaatctaagtctgtgctccttccttcgttcttccttctgttcggagattaccgaatcaaaaaaatttcaaagaaaccgaaatcaaaaaaaagaataaaaaaaaaatgatgaattgaattgaaaagctagcttatcgatgataagctgtcaaagatgagaattaattccacggactatagactatactagatactccgtctactgtacgatacacttccgctcaggtccttgtcctttaacgaggccttaccactcttttgttactctattgatccagctcagcaaaggcagtgtgatctaagattctatcttcgcgatgtagtaaaactagctagaccgagaaagagactagaaatgcaaaaggcacttctacaatggctgccatcattattatccgatgtgacgctgcagcttctcaatgatattcgaatacgctttgaggagatacagcctaatatccgacaaactgttttacagatttacgatcgtacttgttacccatcattgaattttgaacatccgaacctgggagttttccctgaaacagatagtatatttgaacctgtataataatatatagtctagcgctttacggaagacaatgtatgtatttcggttcctggagaaactattgcatctattgcataggtaatcttgcacgtcgcatccccggttcattttctgcgtttccatcttgcacttcaatagcatatctttgttaacgaagcatctgtgcttcattttgtagaacaaaaatgcaacgcgagagcgctaatttttcaaacaaagaatctgagctgcatttttacagaacagaaatgcaacgcgaaagcgctattttaccaacgaagaatctgtgcttcatttttgtaaaacaaaaatgcaacgcgacgagagcgctaatttttcaaacaaagaatctgagctgcatttttacagaacagaaatgcaacgcgagagcgctattttaccaacaaagaatctatacttcttttttgttctacaaaaatgcatcccgagagcgctatttttctaacaaagcatcttagattactttttttctcctttgtgcgctctataatgcagtctcttgataactttttgcactgtaggtccgttaaggttagaagaaggctactttggtgtctattttctcttccataaaaaaagcctgactccacttcccgcgtttactgattactagcgaagctgcgggtgcattttttcaagataaaggcatccccgattatattctataccgatgtggattgcgcatactttgtgaacagaaagtgatagcgttgatgattcttcattggtcagaaaattatgaacggtttcttctattttgtctctatatactacgtataggaaatgtttacattttcgtattgttttcgattcactctatgaatagttcttactacaatttttttgtctaaagagtaatactagagataaacataaaaaatgtagaggtcgagtttagatgcaagttcaaggagcgaaaggtggatgggtaggttatatagggatatagcacagagatatatagcaaagagatacttttgagcaatgtttgtggaagcggtattcgcaatgggaagctccaccccggttgataatcagaaaagccccaaaaacaggaagattgtataagcaaatatttaaattgtaaacgttaatattttgttaaaattcgcgttaaatttttgttaaatcagctcattttttaacgaatagcccgaaatcggcaaaatcccttataaatcaaaagaatagaccgagatagggttgagtgttgttccagtttccaacaagagtccactattaaagaacgtggactccaacgtcaaagggcgaaaaagggtctatcagggcgatggcccactacgtgaaccatcaccctaatcaagttttttggggtcgaggtgccgtaaagcagtaaatcggaagggtaaacggatgcccccatttagagcttgacggggaaagccggcgaacgtggcgagaaaggaagggaagaaagcgaaaggagcgggggctagggcggtgggaagtgtaggggtcacgctgggcgtaaccaccacacccgccgcgcttaatggggcgctacagggcgcgtggggatgatccactagtacggattagaagccgccgagcgggtgacagccctccgaaggaagactctcctccgtgcgtcctcgtcttcaccggtcgcgttcctgaaacgcagatgtgcctcgcgccgcactgctccgaacaataaagattctacaatactagcttttatggttatgaagaggaaaaattggcagtaacctggccccacaaaccttcaaatgaacgaatcaaattaacaaccataggatgataatgcgattagttttttagccttatttctggggtaattaatcagcgaagcgatgatttttgatctattaacagatatataaatgcaaaaactgcataaccactttaactaatactttcaacattttcggtttgtattacttcttattcaaatgtaataaaagtatcaacaaaaaattgttaatatacctctatactttaacgtcaaggagaaaaaaccccggatcggactactagcagctgtaatacgactcactatagggaatattaagcttaaacaatggccgattttagggaagaatataaacaaaagttagtctcggcagatgaggccgtgaagttaattaagagcggcgactgggttgattacggctggtgcaccaacactgttgacgctttggatcaagcccttgctaaaagaactgacgaattaactgacgtaaaactaagaggcggtatactaatgaaacctttagcagtattcgccagagaagatgccggtgaacacttttgctggaactcctggcacatgagtggtatagaaagaaaaatgattaatagaggcgttgcatattattgtccaatcagatacagcgagcttccaaggtattatcgtgaacttgattgtcctgatgacgttgctatgttccaggttgcccctatggatgctcatggatattttaacttcggcccgtccgcttctcatttgggagctatgtgcgaacgtgccaaacacataattgtcgaagtcaatgaaaatatgcctagatgcttgggcggtacagaatgtggcattcatattagcgatgtaacatatatcgtcgagggttcaaatcctccgattggcgaattaggtgctggcggtccagccacagacgttgataaagcagtggcaaagttgatagttgacgaaataccaaatggcgcttgtttgcagttaggcattgggggcatgcctaacgcagttggatcgcttatagcagaatctgacttaaaagatttaggcgttcacaccgaaatgtatgtagatgcattcgttgacatagcaaaggctggaaaaattaatggtagtaaaaagaatattgatcgttatagacaaacatatgcttttggggctggaactaaaaagatgtatgattatctggatgacaatcctgaactgatgtcagcacctgtcgactatactaatgatattagatccatttcagctttagataattttatctctatcaataatgctgttgatattgacctatacgggcaagttaatgctgagtctgccggtatcaagcagattagcggtgctggtggccaattagatttcgtcttgggtgcatacctttccaagggaggtaaatcatttatctgcttgtcttcgactttcaaaacaaaggacgggcaagtacaatccagaataagaccaacattagccaacggctctatcgtaactgatgctagacctaatacccattacgtagtcacagaatacggaaaagtaaatttaaaaggtttgagcacatggcaaagggctgaggcactgataagcattgcacaccccgattttagagatgatttgattaaagaagcagaacagatgcacatatggcgtcgttctaataggtaactcgagcatgcatctagagggccgcatcatgtaattagttatgtcacgcttacattcacgccctccccccacatccgctctaaccgaaaaggaaggagttagacaacctgaagtctaggtccctatttatttttttatagttatgttagtattaagaacgttatttatatttcaaatttttcttttttttctgtacagacgcgtgtacgcatgtaacattatactgaaaaccttgcttgagaaggttttgggacgctcgaaggctttaatttgcggccctgcattaatgaatcggccaacgcgcggggagaggcggtttgcgtattgggcgctcttccgcttcctcgctcactgactcgctgcgctcggtcgttcggctgcggcgagcggtatcagctcactcaaaggcggtaatacggttatccacagaatcaggggataacgcaggaaagaacatgtgagcaaaaggccagcaaaagcccaggaaccgtaaaaaggccgcgttgctggcgtttttccataggctccgcccccctgacgagcatcacaaaaatcgacgctcaagtcagaggtggcgaaacccgacaggactataaagataccaggcgtttccccctggaagctccctcgtgcgctctcctgttccgaccctgccgcttaccggatacctgtccgcctttctcccttcgggaagcgtggcgctttctcatagctcacgctgtaggtatctcagttcggtgtaggtcgttcgctccaagctgggctgtgtgcacgaaccccccgttcagcccgaccgctgcgccttatccggtaactatcgtcttgagtccaacccggtaagacacgacttatcgccactggcagcagccactggtaacaggattagcagagcgaggtatgtaggcggtgctacagagttcttgaagtggtggcctaactacggctacactagaaggacagtatttggtatctgcgctctgctgaagccagttaccttcggaaaaagagttggtagctcttgatccggcaaacaaaccaccgctggtagcggtggtttttttgtttgcaagcagcagattacgcgcagaaaaaaaggatctcaagaagatcctttgatcttttctacggggtctgacgctcagtggaacgaaaactcacgttaagggattttggtcatgagattatcaaaaaggatcttcacctagatccttttaaattaaaaatgaagttttaaatcaatctaaagtatatatgagtaaacttggtctgacagttaccaatgcttaatcagtgaggcacctatctcagcgatctgtctatttcgttcatccatagttgcctgactccccgtcgtgtagataactacgatacgggagcgcttaccatctggccccagtgctgcaatgataccgcgagacccacgctcaccggctccagatttatcagcaataaaccagccagccggaagggccgagcgcagaagtggtcctgcaactttatccgcctccattcagtctattaattgttgccgggaagctagagtaagtagttcgccagttaatagtttgcgcaacgttgttggcattgctacaggcatcgtggtgtcactctcgtcgtttggtatggcttcattcagctccggttcccaacgatcaaggcgagttacatgatcccccatgttgtgcaaaaaagcggttagctccttcggtcctccgatcgttgtcagaagtaagttggccgcagtgttatcactcatggttatggcagcactgcataattctcttactgtcatgccatccgtaagatgcttttctgtgactggtgagtactcaaccaagtcattctgagaatagtgtatgcggcgaccgagttgctcttgcccggcgtcaatacgggataatagtgtatcacatagcagaactttaaaagtgctcatcattggaaaacgttcttcggggcgaaaactctcaaggatcttaccgctgttgagatccagttcgatgtaacccactcgtgcacccaactgatcttcagcatcttttactttcaccagcgtttctgggtgagcaaaaacaggaaggcaaaatgccgcaaaaaagggaataagggcgacacggaaatgttgaatactcatactcttcctttttcaatgggtaataactgatataattaaattgaagctctaatttgtgagtttagtatacatgcatttacttataatacagttttttagttttgctggccgcatcttctcaaatatgcttcccagcctgcttttctgtaacgttcaccctctaccttagcatcccttccctttgcaaatagtcctcttccaacaataataatgtcagatcctgtagagaccacatcatccacggttctatactgttgacccaatgcgtctcccttgtcatctaaacccacaccgggtgtcataatcaaccaatcgtaaccttcatctcttccacccatgtctctttgagcaataaagccgataacaaaatctttgtcgctcttcgcaatgtcaacagtacccttagtatattctccagtagatagggagcccttgcatgacaattctgctaacatcaaaaggcctctaggttcctttgttacttcttctgccgcctgcttcaaaccgctaacaatacctgggcccaccacaccgtgtgcattcgtaatgtctgcccattctgctattctgtatacacccgcagagtactgcaatttgactgtattaccaatgtcagcaaattttctgtcttcg

SEQ ID NO: 370 - DNA, 7126 bp, Artificial Sequence
  PLAS469
aagagtaaaaaattgtacttggcggataatgcctttagcggcttaactgtgccctccatggaaaaatcagtcaagatatccacatgtgtttttagtaaacaaattttgggacctaatgcttcaactaactccagtaattccttggtggtacgaacatccaatgaagcacacaagtttgtttgcttttcgtgcatgatattaaatagcttggcagcaacaggactaggatgagtagcagcacgttccttatatgtagctttcgacatgatttatcttcgtttcctgcaggtttttgttctgtgcagttgggttaagaatactgggcaatttcatgtttcttcaacactacatatgcgtatatataccaatctaagtctgtgctccttccttcgttcttccttctgttcggagattaccgaatcaaaaaaatttcaaagaaaccgaaatcaaaaaaaagaataaaaaaaaaatgatgaattgaattgaaaagctagcttatcgatgataagctgtcaaagatgagaattaattccacggactatagactatactagatactccgtctactgtacgatacacttccgctcaggtccttgtcctttaacgaggccttaccactcttttgttactctattgatccagctcagcaaaggcagtgtgatctaagattctatcttcgcgatgtagtaaaactagctagaccgagaaagagactagaaatgcaaaaggcacttctacaatggctgccatcattattatccgatgtgacgctgcagcttctcaatgatattcgaatacgctttgaggagatacagcctaatatccgacaaactgttttacagatttacgatcgtacttgttacccatcattgaattttgaacatccgaacctgggagttttccctgaaacagatagtatatttgaacctgtataataatatatagtctagcgctttacggaagacaatgtatgtatttcggttcctggagaaactattgcatctattgcataggtaatcttgcacgtcgcatccccggttcattttctgcgtttccatcttgcacttcaatagcatatctttgttaacgaagcatctgtgcttcattttgtagaacaaaaatgcaacgcgagagcgctaatttttcaaacaaagaatctgagctgcatttttacagaacagaaatgcaacgcgaaagcgctattttaccaacgaagaatctgtgcttcatttttgtaaaacaaaaatgcaacgcgacgagagcgctaatttttcaaacaaagaatctgagctgcatttttacagaacagaaatgcaacgcgagagcgctattttaccaacaaagaatctatacttcttttttgttctacaaaaatgcatcccgagagcgctatttttctaacaaagcatcttagattactttttttctcctttgtgcgctctataatgcagtctcttgataactttttgcactgtaggtccgttaaggttagaagaaggctactttggtgtctattttctcttccataaaaaaagcctgactccacttcccgcgtttactgattactagcgaagctgcgggtgcattttttcaagataaaggcatccccgattatattctataccgatgtggattgcgcatactttgtgaacagaaagtgatagcgttgatgattcttcattggtcagaaaattatgaacggtttcttctattttgtctctatatactacgtataggaaatgtttacattttcgtattgttttcgattcactctatgaatagttcttactacaatttttttgtctaaagagtaatactagagataaacataaaaaatgtagaggtcgagtttagatgcaagttcaaggagcgaaaggtggatgggtaggttatatagggatatagcacagagatatatagcaaagagatacttttgagcaatgtttgtggaagcggtattcgcaatgggaagctccaccccggttgataatcagaaaagccccaaaaacaggaagattgtataagcaaatatttaaattgtaaacgttaatattttgttaaaattcgcgttaaatttttgttaaatcagctcattttttaacgaatagcccgaaatcggcaaaatcccttataaatcaaaagaatagaccgagatagggttgagtgttgttccagtttccaacaagagtccactattaaagaacgtggactccaacgtcaaagggcgaaaaagggtctatcagggcgatggcccactacgtgaaccatcaccctaatcaagttttttggggtcgaggtgccgtaaagcagtaaatcggaagggtaaacggatgcccccatttagagcttgacggggaaagccggcgaacgtggcgagaaaggaagggaagaaagcgaaaggagcgggggctagggcggtgggaagtgtaggggtcacgctgggcgtaaccaccacacccgccgcgcttaatggggcgctacagggcgcgtggggatgatccactagtacggattagaagccgccgagcgggtgacagccctccgaaggaagactctcctccgtgcgtcctcgtcttcaccggtcgcgttcctgaaacgcagatgtgcctcgcgccgcactgctccgaacaataaagattctacaatactagcttttatggttatgaagaggaaaaattggcagtaacctggccccacaaaccttcaaatgaacgaatcaaattaacaaccataggatgataatgcgattagttttttagccttatttctggggtaattaatcagcgaagcgatgatttttgatctattaacagatatataaatgcaaaaactgcataaccactttaactaatactttcaacattttcggtttgtattacttcttattcaaatgtaataaaagtatcaacaaaaaattgttaatatacctctatactttaacgtcaaggagaaaaaaccccggatcggactactagcagctgtaatacgactcactatagggaatattaagcttaaacaatgtctttcatcaaagagtatgcccagaagcttgtcacagctgaagaggctgtgaaagttgttaagtcacatgactgggttgattacggctggacaacaggaacccctgtagccttagatgctgcactggcagctagagcagatgaattagaagatgttaaagttagaggtggcatcctattacgtgaacctgagatattcaaggtcgataatgttgcagaacattttacatggaattcatggcatatgggtggtttggaaagaaaggcaatttcaaaaggtttcgccttttactctccattaaaatactctgaattacctagatattacagggaaaatataaagcatcttaatgtcgctatgtttcaagtagctccaatggacaaacatggtttttttaattttggtcctaatgctagtcatatgatggcagtgtgtgaaactgctgatgtaattattgtagaagtcaatgaaaatatgccaaggtgtctgggtggctttgaagaaggtattcatatcagtagggtcgattatatagtagaaggacaaaaccctgccattggagaattgggtgctggggcgccaccaactgaagttgatagggcagttgctcaattgattgttgaggaaattccgaacggggcatgcttacaattgggtataggaggcatgcccaacaccgttggcagcatgatagccgaatccgacttaaaggacttaggtgtccatacagaaatgtacgtcgatgcattcgttgatattgcgaaggctggtaaaatcaacggtttaaagaagaatatcgacaaaggtagacaagtttacgctttcggcgccggtaccaaaaagatgtatgactacttggatgataaccctgaatgcatgtctgctcccgtagactatactaactccgctaaaacgatagctcaaatagataacttcatttcaatcaacaatgccgtcgatatcgacctatatggtcaagtgaatgcagagtctgctggcgttaagcaaatttcgggtgcgggtgggcagttagattttgtacaaggtgcttatttgtccaagggtggtaagagttttatatgttgctcctctaccttcaccagcagagatggcgtcaagcacacccgtatcaggcctacattggctgagggaagtaccgtaacggatacccgtcctaatacacactacgtcgttacggaattcggtaaggtctgtttgaagggtatgtccacatggcaaagagccgaagcgcttatatcaattgcccatccagattttcgtgacgaacttattaaggaagcagaaaagatgcaaatctggagacgttctaataaataactcgagcatgcatctagagggccgcatcatgtaattagttatgtcacgcttacattcacgccctccccccacatccgctctaaccgaaaaggaaggagttagacaacctgaagtctaggtccctatttatttttttatagttatgttagtattaagaacgttatttatatttcaaatttttcttttttttctgtacagacgcgtgtacgcatgtaacattatactgaaaaccttgcttgagaaggttttgggacgctcgaaggctttaatttgcggccctgcattaatgaatcggccaacgcgcggggagaggcggtttgcgtattgggcgctcttccgcttcctcgctcactgactcgctgcgctcggtcgttcggctgcggcgagcggtatcagctcactcaaaggcggtaatacggttatccacagaatcaggggataacgcaggaaagaacatgtgagcaaaaggccagcaaaagcccaggaaccgtaaaaaggccgcgttgctggcgtttttccataggctccgcccccctgacgagcatcacaaaaatcgacgctcaagtcagaggtggcgaaacccgacaggactataaagataccaggcgtttccccctggaagctccctcgtgcgctctcctgttccgaccctgccgcttaccggatacctgtccgcctttctcccttcgggaagcgtggcgctttctcatagctcacgctgtaggtatctcagttcggtgtaggtcgttcgctccaagctgggctgtgtgcacgaaccccccgttcagcccgaccgctgcgccttatccggtaactatcgtcttgagtccaacccggtaagacacgacttatcgccactggcagcagccactggtaacaggattagcagagcgaggtatgtaggcggtgctacagagttcttgaagtggtggcctaactacggctacactagaaggacagtatttggtatctgcgctctgctgaagccagttaccttcggaaaaagagttggtagctcttgatccggcaaacaaaccaccgctggtagcggtggtttttttgtttgcaagcagcagattacgcgcagaaaaaaaggatctcaagaagatcctttgatcttttctacggggtctgacgctcagtggaacgaaaactcacgttaagggattttggtcatgagattatcaaaaaggatcttcacctagatccttttaaattaaaaatgaagttttaaatcaatctaaagtatatatgagtaaacttggtctgacagttaccaatgcttaatcagtgaggcacctatctcagcgatctgtctatttcgttcatccatagttgcctgactccccgtcgtgtagataactacgatacgggagcgcttaccatctggccccagtgctgcaatgataccgcgagacccacgctcaccggctccagatttatcagcaataaaccagccagccggaagggccgagcgcagaagtggtcctgcaactttatccgcctccattcagtctattaattgttgccgggaagctagagtaagtagttcgccagttaatagtttgcgcaacgttgttggcattgctacaggcatcgtggtgtcactctcgtcgtttggtatggcttcattcagctccggttcccaacgatcaaggcgagttacatgatcccccatgttgtgcaaaaaagcggttagctccttcggtcctccgatcgttgtcagaagtaagttggccgcagtgttatcactcatggttatggcagcactgcataattctcttactgtcatgccatccgtaagatgcttttctgtgactggtgagtactcaaccaagtcattctgagaatagtgtatgcggcgaccgagttgctcttgcccggcgtcaatacgggataatagtgtatcacatagcagaactttaaaagtgctcatcattggaaaacgttcttcggggcgaaaactctcaaggatcttaccgctgttgagatccagttcgatgtaacccactcgtgcacccaactgatcttcagcatcttttactttcaccagcgtttctgggtgagcaaaaacaggaaggcaaaatgccgcaaaaaagggaataagggcgacacggaaatgttgaatactcatactcttcctttttcaatgggtaataactgatataattaaattgaagctctaatttgtgagtttagtatacatgcatttacttataatacagttttttagttttgctggccgcatcttctcaaatatgcttcccagcctgcttttctgtaacgttcaccctctaccttagcatcccttccctttgcaaatagtcctcttccaacaataataatgtcagatcctgtagagaccacatcatccacggttctatactgttgacccaatgcgtctcccttgtcatctaaacccacaccgggtgtcataatcaaccaatcgtaaccttcatctcttccacccatgtctctttgagcaataaagccgataacaaaatctttgtcgctcttcgcaatgtcaacagtacccttagtatattctccagtagatagggagcccttgcatgacaattctgctaacatcaaaaggcctctaggttcctttgttacttcttctgccgcctgcttcaaaccgctaacaatacctgggcccaccacaccgtgtgcattcgtaatgtctgcccattctgctattctgtatacacccgcagagtactgcaatttgactgtattaccaatgtcagcaaattttctgtcttcg

SEQ ID NO: 371 - DNA, 7135 bp, Artificial Sequence
  PLAS470
aagagtaaaaaattgtacttggcggataatgcctttagcggcttaactgtgccctccatggaaaaatcagtcaagatatccacatgtgtttttagtaaacaaattttgggacctaatgcttcaactaactccagtaattccttggtggtacgaacatccaatgaagcacacaagtttgtttgcttttcgtgcatgatattaaatagcttggcagcaacaggactaggatgagtagcagcacgttccttatatgtagctttcgacatgatttatcttcgtttcctgcaggtttttgttctgtgcagttgggttaagaatactgggcaatttcatgtttcttcaacactacatatgcgtatatataccaatctaagtctgtgctccttccttcgttcttccttctgttcggagattaccgaatcaaaaaaatttcaaagaaaccgaaatcaaaaaaaagaataaaaaaaaaatgatgaattgaattgaaaagctagcttatcgatgataagctgtcaaagatgagaattaattccacggactatagactatactagatactccgtctactgtacgatacacttccgctcaggtccttgtcctttaacgaggccttaccactcttttgttactctattgatccagctcagcaaaggcagtgtgatctaagattctatcttcgcgatgtagtaaaactagctagaccgagaaagagactagaaatgcaaaaggcacttctacaatggctgccatcattattatccgatgtgacgctgcagcttctcaatgatattcgaatacgctttgaggagatacagcctaatatccgacaaactgttttacagatttacgatcgtacttgttacccatcattgaattttgaacatccgaacctgggagttttccctgaaacagatagtatatttgaacctgtataataatatatagtctagcgctttacggaagacaatgtatgtatttcggttcctggagaaactattgcatctattgcataggtaatcttgcacgtcgcatccccggttcattttctgcgtttccatcttgcacttcaatagcatatctttgttaacgaagcatctgtgcttcattttgtagaacaaaaatgcaacgcgagagcgctaatttttcaaacaaagaatctgagctgcatttttacagaacagaaatgcaacgcgaaagcgctattttaccaacgaagaatctgtgcttcatttttgtaaaacaaaaatgcaacgcgacgagagcgctaatttttcaaacaaagaatctgagctgcatttttacagaacagaaatgcaacgcgagagcgctattttaccaacaaagaatctatacttcttttttgttctacaaaaatgcatcccgagagcgctatttttctaacaaagcatcttagattactttttttctcctttgtgcgctctataatgcagtctcttgataactttttgcactgtaggtccgttaaggttagaagaaggctactttggtgtctattttctcttccataaaaaaagcctgactccacttcccgcgtttactgattactagcgaagctgcgggtgcattttttcaagataaaggcatccccgattatattctataccgatgtggattgcgcatactttgtgaacagaaagtgatagcgttgatgattcttcattggtcagaaaattatgaacggtttcttctattttgtctctatatactacgtataggaaatgtttacattttcgtattgttttcgattcactctatgaatagttcttactacaatttttttgtctaaagagtaatactagagataaacataaaaaatgtagaggtcgagtttagatgcaagttcaaggagcgaaaggtggatgggtaggttatatagggatatagcacagagatatatagcaaagagatacttttgagcaatgtttgtggaagcggtattcgcaatgggaagctccaccccggttgataatcagaaaagccccaaaaacaggaagattgtataagcaaatatttaaattgtaaacgttaatattttgttaaaattcgcgttaaatttttgttaaatcagctcattttttaacgaatagcccgaaatcggcaaaatcccttataaatcaaaagaatagaccgagatagggttgagtgttgttccagtttccaacaagagtccactattaaagaacgtggactccaacgtcaaagggcgaaaaagggtctatcagggcgatggcccactacgtgaaccatcaccctaatcaagttttttggggtcgaggtgccgtaaagcagtaaatcggaagggtaaacggatgcccccatttagagcttgacggggaaagccggcgaacgtggcgagaaaggaagggaagaaagcgaaaggagcgggggctagggcggtgggaagtgtaggggtcacgctgggcgtaaccaccacacccgccgcgcttaatggggcgctacagggcgcgtggggatgatccactagtacggattagaagccgccgagcgggtgacagccctccgaaggaagactctcctccgtgcgtcctcgtcttcaccggtcgcgttcctgaaacgcagatgtgcctcgcgccgcactgctccgaacaataaagattctacaatactagcttttatggttatgaagaggaaaaattggcagtaacctggccccacaaaccttcaaatgaacgaatcaaattaacaaccataggatgataatgcgattagttttttagccttatttctggggtaattaatcagcgaagcgatgatttttgatctattaacagatatataaatgcaaaaactgcataaccactttaactaatactttcaacattttcggtttgtattacttcttattcaaatgtaataaaagtatcaacaaaaaattgttaatatacctctatactttaacgtcaaggagaaaaaaccccggatcggactactagcagctgtaatacgactcactatagggaatattaagcttaaacaatggctgactttaccgagctgtatgcacaaaaaaaaatgaccgctgatcaggctgcagctttagtaaaatctggtgattgggttgattatggctgggcagtgaatactcccgtagcggttgacgctgcaatcgctaaacgtttaccagagctagaagacgtcaatttcagaggtggaatcttaatgtgggttccagcaattttccaaatcgaggatcctgccgcacacatgacttggaactcgtggcatatgggtggtatcgaacgtaaggctattgctcaaggattctccttctattctcctattaggtactcagaattacccaggtattacagggactcatctgaccccgtggatgtagctgtgtttcaagttacaccaatggacgaacatggatactttaactttggtccatgcgcaagccacctgggagcagtttgtgataaagcgaagaaaatcattgttgaagtgaacagaaatatgccaaagtgtctaggcgggacggagaattgggtgcacatttctcaagttgctggagtcgttgaaggcagtaatccaccgatagggcaaatggcagcagctggagcagcaactgaagtcgaccttaaagtggctaacttgatagtaccacaaattcccgatggggcgtgcctgcaactaggtattggaggtatgccaaacgcaattggtaatctgatagcgcagtcggatttgaaggacctaggagttcacacggagatgtacgtggatgcctttgtggatattgctaaagcaggtaaaattacaggcaggcataagaatctggataagggaaggcaagtatatgcttttggtgctggcacacagaaaatgtacgactatttaaacgataatccggaatgcatggccgcaccggtggaatacactaatgatataagatcaatatccgcaatagataattttatttctattaataacgcagtggatattgatctatttggtcaagttaatgctgaaagcgctggtataaaacacatcagtggtgccggaggacaattggactttgtcctgggtgcttacctatcaaacggcggaaaatcctttatttgtttatcgtcgacatttatgaataaaaaaaccggtaagttagaatcaaggattagaccaaccttggaaaatggctctattgttacagacactcgtgctaacgtgcactatctttgtacagaatatggttgtgttaatctgaaggggttgacttcttgggaaaaggccgaagcattaatatccgttgcccatccagattttagagatgagcttatcgccgaggccgaaaaattacatatctggagaagatcaaacaagagatgactcgagcatgcatctagagggccgcatcatgtaattagttatgtcacgcttacattcacgccctccccccacatccgctctaaccgaaaaggaaggagttagacaacctgaagtctaggtccctatttatttttttatagttatgttagtattaagaacgttatttatatttcaaatttttcttttttttctgtacagacgcgtgtacgcatgtaacattatactgaaaaccttgcttgagaaggttttgggacgctcgaaggctttaatttgcggccctgcattaatgaatcggccaacgcgcggggagaggcggtttgcgtattgggcgctcttccgcttcctcgctcactgactcgctgcgctcggtcgttcggctgcggcgagcggtatcagctcactcaaaggcggtaatacggttatccacagaatcaggggataacgcaggaaagaacatgtgagcaaaaggccagcaaaagcccaggaaccgtaaaaaggccgcgttgctggcgtttttccataggctccgcccccctgacgagcatcacaaaaatcgacgctcaagtcagaggtggcgaaacccgacaggactataaagataccaggcgtttccccctggaagctccctcgtgcgctctcctgttccgaccctgccgcttaccggatacctgtccgcctttctcccttcgggaagcgtggcgctttctcatagctcacgctgtaggtatctcagttcggtgtaggtcgttcgctccaagctgggctgtgtgcacgaaccccccgttcagcccgaccgctgcgccttatccggtaactatcgtcttgagtccaacccggtaagacacgacttatcgccactggcagcagccactggtaacaggattagcagagcgaggtatgtaggcggtgctacagagttcttgaagtggtggcctaactacggctacactagaaggacagtatttggtatctgcgctctgctgaagccagttaccttcggaaaaagagttggtagctcttgatccggcaaacaaaccaccgctggtagcggtggtttttttgtttgcaagcagcagattacgcgcagaaaaaaaggatctcaagaagatcctttgatcttttctacggggtctgacgctcagtggaacgaaaactcacgttaagggattttggtcatgagattatcaaaaaggatcttcacctagatccttttaaattaaaaatgaagttttaaatcaatctaaagtatatatgagtaaacttggtctgacagttaccaatgcttaatcagtgaggcacctatctcagcgatctgtctatttcgttcatccatagttgcctgactccccgtcgtgtagataactacgatacgggagcgcttaccatctggccccagtgctgcaatgataccgcgagacccacgctcaccggctccagatttatcagcaataaaccagccagccggaagggccgagcgcagaagtggtcctgcaactttatccgcctccattcagtctattaattgttgccgggaagctagagtaagtagttcgccagttaatagtttgcgcaacgttgttggcattgctacaggcatcgtggtgtcactctcgtcgtttggtatggcttcattcagctccggttcccaacgatcaaggcgagttacatgatcccccatgttgtgcaaaaaagcggttagctccttcggtcctccgatcgttgtcagaagtaagttggccgcagtgttatcactcatggttatggcagcactgcataattctcttactgtcatgccatccgtaagatgcttttctgtgactggtgagtactcaaccaagtcattctgagaatagtgtatgcggcgaccgagttgctcttgcccggcgtcaatacgggataatagtgtatcacatagcagaactttaaaagtgctcatcattggaaaacgttcttcggggcgaaaactctcaaggatcttaccgctgttgagatccagttcgatgtaacccactcgtgcacccaactgatcttcagcatcttttactttcaccagcgtttctgggtgagcaaaaacaggaaggcaaaatgccgcaaaaaagggaataagggcgacacggaaatgttgaatactcatactcttcctttttcaatgggtaataactgatataattaaattgaagctctaatttgtgagtttagtatacatgcatttacttataatacagttttttagttttgctggccgcatcttctcaaatatgcttcccagcctgcttttctgtaacgttcaccctctaccttagcatcccttccctttgcaaatagtcctcttccaacaataataatgtcagatcctgtagagaccacatcatccacggttctatactgttgacccaatgcgtctcccttgtcatctaaacccacaccgggtgtcataatcaaccaatcgtaaccttcatctcttccacccatgtctctttgagcaataaagccgataacaaaatctttgtcgctcttcgcaatgtcaacagtacccttagtatattctccagtagatagggagcccttgcatgacaattctgctaacatcaaaaggcctctaggttcctttgttacttcttctgccgcctgcttcaaaccgctaacaatacctgggcccaccacaccgtgtgcattcgtaatgtctgcccattctgctattctgtatacacccgcagagtactgcaatttgactgtattaccaatgtcagcaaattttctgtcttcg

SEQ ID NO: 372 - DNA, 7132 bp, Artificial Sequence
  PLAS471
aagagtaaaaaattgtacttggcggataatgcctttagcggcttaactgtgccctccatggaaaaatcagtcaagatatccacatgtgtttttagtaaacaaattttgggacctaatgcttcaactaactccagtaattccttggtggtacgaacatccaatgaagcacacaagtttgtttgcttttcgtgcatgatattaaatagcttggcagcaacaggactaggatgagtagcagcacgttccttatatgtagctttcgacatgatttatcttcgtttcctgcaggtttttgttctgtgcagttgggttaagaatactgggcaatttcatgtttcttcaacactacatatgcgtatatataccaatctaagtctgtgctccttccttcgttcttccttctgttcggagattaccgaatcaaaaaaatttcaaagaaaccgaaatcaaaaaaaagaataaaaaaaaaatgatgaattgaattgaaaagctagcttatcgatgataagctgtcaaagatgagaattaattccacggactatagactatactagatactccgtctactgtacgatacacttccgctcaggtccttgtcctttaacgaggccttaccactcttttgttactctattgatccagctcagcaaaggcagtgtgatctaagattctatcttcgcgatgtagtaaaactagctagaccgagaaagagactagaaatgcaaaaggcacttctacaatggctgccatcattattatccgatgtgacgctgcagcttctcaatgatattcgaatacgctttgaggagatacagcctaatatccgacaaactgttttacagatttacgatcgtacttgttacccatcattgaattttgaacatccgaacctgggagttttccctgaaacagatagtatatttgaacctgtataataatatatagtctagcgctttacggaagacaatgtatgtatttcggttcctggagaaactattgcatctattgcataggtaatcttgcacgtcgcatccccggttcattttctgcgtttccatcttgcacttcaatagcatatctttgttaacgaagcatctgtgcttcattttgtagaacaaaaatgcaacgcgagagcgctaatttttcaaacaaagaatctgagctgcatttttacagaacagaaatgcaacgcgaaagcgctattttaccaacgaagaatctgtgcttcatttttgtaaaacaaaaatgcaacgcgacgagagcgctaatttttcaaacaaagaatctgagctgcatttttacagaacagaaatgcaacgcgagagcgctattttaccaacaaagaatctatacttcttttttgttctacaaaaatgcatcccgagagcgctatttttctaacaaagcatcttagattactttttttctcctttgtgcgctctataatgcagtctcttgataactttttgcactgtaggtccgttaaggttagaagaaggctactttggtgtctattttctcttccataaaaaaagcctgactccacttcccgcgtttactgattactagcgaagctgcgggtgcattttttcaagataaaggcatccccgattatattctataccgatgtggattgcgcatactttgtgaacagaaagtgatagcgttgatgattcttcattggtcagaaaattatgaacggtttcttctattttgtctctatatactacgtataggaaatgtttacattttcgtattgttttcgattcactctatgaatagttcttactacaatttttttgtctaaagagtaatactagagataaacataaaaaatgtagaggtcgagtttagatgcaagttcaaggagcgaaaggtggatgggtaggttatatagggatatagcacagagatatatagcaaagagatacttttgagcaatgtttgtggaagcggtattcgcaatgggaagctccaccccggttgataatcagaaaagccccaaaaacaggaagattgtataagcaaatatttaaattgtaaacgttaatattttgttaaaattcgcgttaaatttttgttaaatcagctcattttttaacgaatagcccgaaatcggcaaaatcccttataaatcaaaagaatagaccgagatagggttgagtgttgttccagtttccaacaagagtccactattaaagaacgtggactccaacgtcaaagggcgaaaaagggtctatcagggcgatggcccactacgtgaaccatcaccctaatcaagttttttggggtcgaggtgccgtaaagcagtaaatcggaagggtaaacggatgcccccatttagagcttgacggggaaagccggcgaacgtggcgagaaaggaagggaagaaagcgaaaggagcgggggctagggcggtgggaagtgtaggggtcacgctgggcgtaaccaccacacccgccgcgcttaatggggcgctacagggcgcgtggggatgatccactagtacggattagaagccgccgagcgggtgacagccctccgaaggaagactctcctccgtgcgtcctcgtcttcaccggtcgcgttcctgaaacgcagatgtgcctcgcgccgcactgctccgaacaataaagattctacaatactagcttttatggttatgaagaggaaaaattggcagtaacctggccccacaaaccttcaaatgaacgaatcaaattaacaaccataggatgataatgcgattagttttttagccttatttctggggtaattaatcagcgaagcgatgatttttgatctattaacagatatataaatgcaaaaactgcataaccactttaactaatactttcaacattttcggtttgtattacttcttattcaaatgtaataaaagtatcaacaaaaaattgttaatatacctctatactttaacgtcaaggagaaaaaaccccggatcggactactagcagctgtaatacgactcactatagggaatattaagcttaaacaatggcaggatatgctgaagaatatcaaaagaaattagtttccgcagatgaagcggtaaaagtagtgaagtctggtgattggattgactacggatggtgcaatggcacggcagacgctttagatcaggccttagcaaagagaacggacgaattaacagacataaacgttagaggtgggattttattgaaaactcctgcgatatttgaaagagaagatgccggtgaacattttacatggaactcttggcatatgtctggtatagaaagaaaattgatatccagagggtgtgcgtactatgcccctattagatactcggagttgcctagatactatcgtgaagccaacacgaaaaaaaatgcagttgccatgttccaggtcacacccatggataaacatggtttctttaactttggcccaaacgcatctcatttagcagcagtcgttgaaacctcagccacagtaatagttgaggtcaatgagaatatgcctcgttgtctagggggcactgaaaacaatgtccatatctctgatgtagatttcattgtggaaggaagtaacccgcccattgccgaaatgggtgccgggggccctgcttcagaagttgataaggcagtcgcaaaacttatagtaaatgaaataccaaatggtgcttgtttacaattgggtattggaggcatgccaaatgctgtgggttcattgatcgccgaatcagacttaaaggatttgggtgttcatacggaaatgtacgttgacgcattcgtagatattgccaaggcgggcaaaataaacggctctcgtaagaatattgacaggtttagacaagcttttgccttcggatgcggcactaagaagatgtatgattacttggatgataatcctgaaattttaagtgctcctgtcagttataccaacgacattagatcaatatcggctcaagataacttcatgtcaatcaacaatgccgtcgacttggacttatttggccaggtcaacgcagaatctgctggcactaaacacattagtggagcaggaggacaattggactttgttcttggtgcatacttgtctaacggtggtaagtcgttcatatgttgtagttctacatacaagacgaaagatggccaagtaaagtcaaggattttgccaactcttaatccaggcagcattgtaacagatacaagagctaatacacacttcctagtgacagaatacgggatagttaacataaagggattgtcgacttgggaaaaagcagaggctatcatctccattgcccaccctgattttcgtgatgaattaattgcagaagccgaaaaaatgaaaatttggaggaggtcaaataaatgactcgagcatgcatctagagggccgcatcatgtaattagttatgtcacgcttacattcacgccctccccccacatccgctctaaccgaaaaggaaggagttagacaacctgaagtctaggtccctatttatttttttatagttatgttagtattaagaacgttatttatatttcaaatttttcttttttttctgtacagacgcgtgtacgcatgtaacattatactgaaaaccttgcttgagaaggttttgggacgctcgaaggctttaatttgcggccctgcattaatgaatcggccaacgcgcggggagaggcggtttgcgtattgggcgctcttccgcttcctcgctcactgactcgctgcgctcggtcgttcggctgcggcgagcggtatcagctcactcaaaggcggtaatacggttatccacagaatcaggggataacgcaggaaagaacatgtgagcaaaaggccagcaaaagcccaggaaccgtaaaaaggccgcgttgctggcgtttttccataggctccgcccccctgacgagcatcacaaaaatcgacgctcaagtcagaggtggcgaaacccgacaggactataaagataccaggcgtttccccctggaagctccctcgtgcgctctcctgttccgaccctgccgcttaccggatacctgtccgcctttctcccttcgggaagcgtggcgctttctcatagctcacgctgtaggtatctcagttcggtgtaggtcgttcgctccaagctgggctgtgtgcacgaaccccccgttcagcccgaccgctgcgccttatccggtaactatcgtcttgagtccaacccggtaagacacgacttatcgccactggcagcagccactggtaacaggattagcagagcgaggtatgtaggcggtgctacagagttcttgaagtggtggcctaactacggctacactagaaggacagtatttggtatctgcgctctgctgaagccagttaccttcggaaaaagagttggtagctcttgatccggcaaacaaaccaccgctggtagcggtggtttttttgtttgcaagcagcagattacgcgcagaaaaaaaggatctcaagaagatcctttgatcttttctacggggtctgacgctcagtggaacgaaaactcacgttaagggattttggtcatgagattatcaaaaaggatcttcacctagatccttttaaattaaaaatgaagttttaaatcaatctaaagtatatatgagtaaacttggtctgacagttaccaatgcttaatcagtgaggcacctatctcagcgatctgtctatttcgttcatccatagttgcctgactccccgtcgtgtagataactacgatacgggagcgcttaccatctggccccagtgctgcaatgataccgcgagacccacgctcaccggctccagatttatcagcaataaaccagccagccggaagggccgagcgcagaagtggtcctgcaactttatccgcctccattcagtctattaattgttgccgggaagctagagtaagtagttcgccagttaatagtttgcgcaacgttgttggcattgctacaggcatcgtggtgtcactctcgtcgtttggtatggcttcattcagctccggttcccaacgatcaaggcgagttacatgatcccccatgttgtgcaaaaaagcggttagctccttcggtcctccgatcgttgtcagaagtaagttggccgcagtgttatcactcatggttatggcagcactgcataattctcttactgtcatgccatccgtaagatgcttttctgtgactggtgagtactcaaccaagtcattctgagaatagtgtatgcggcgaccgagttgctcttgcccggcgtcaatacgggataatagtgtatcacatagcagaactttaaaagtgctcatcattggaaaacgttcttcggggcgaaaactctcaaggatcttaccgctgttgagatccagttcgatgtaacccactcgtgcacccaactgatcttcagcatcttttactttcaccagcgtttctgggtgagcaaaaacaggaaggcaaaatgccgcaaaaaagggaataagggcgacacggaaatgttgaatactcatactcttcctttttcaatgggtaataactgatataattaaattgaagctctaatttgtgagtttagtatacatgcatttacttataatacagttttttagttttgctggccgcatcttctcaaatatgcttcccagcctgcttttctgtaacgttcaccctctaccttagcatcccttccctttgcaaatagtcctcttccaacaataataatgtcagatcctgtagagaccacatcatccacggttctatactgttgacccaatgcgtctcccttgtcatctaaacccacaccgggtgtcataatcaaccaatcgtaaccttcatctcttccacccatgtctctttgagcaataaagccgataacaaaatctttgtcgctcttcgcaatgtcaacagtacccttagtatattctccagtagatagggagcccttgcatgacaattctgctaacatcaaaaggcctctaggttcctttgttacttcttctgccgcctgcttcaaaccgctaacaatacctgggcccaccacaccgtgtgcattcgtaatgtctgcccattctgctattctgtatacacccgcagagtactgcaatttgactgtattaccaatgtcagcaaattttctgtcttcg

SEQ ID NO: 373 - DNA, 7669 bp, Artificial Sequence
  PLAS472
aagagtaaaaaattgtacttggcggataatgcctttagcggcttaactgtgccctccatggaaaaatcagtcaagatatccacatgtgtttttagtaaacaaattttgggacctaatgcttcaactaactccagtaattccttggtggtacgaacatccaatgaagcacacaagtttgtttgcttttcgtgcatgatattaaatagcttggcagcaacaggactaggatgagtagcagcacgttccttatatgtagctttcgacatgatttatcttcgtttcctgcaggtttttgttctgtgcagttgggttaagaatactgggcaatttcatgtttcttcaacactacatatgcgtatatataccaatctaagtctgtgctccttccttcgttcttccttctgttcggagattaccgaatcaaaaaaatttcaaagaaaccgaaatcaaaaaaaagaataaaaaaaaaatgatgaattgaattgaaaagctagcttatcgatgataagctgtcaaagatgagaattaattccacggactatagactatactagatactccgtctactgtacgatacacttccgctcaggtccttgtcctttaacgaggccttaccactcttttgttactctattgatccagctcagcaaaggcagtgtgatctaagattctatcttcgcgatgtagtaaaactagctagaccgagaaagagactagaaatgcaaaaggcacttctacaatggctgccatcattattatccgatgtgacgctgcagcttctcaatgatattcgaatacgctttgaggagatacagcctaatatccgacaaactgttttacagatttacgatcgtacttgttacccatcattgaattttgaacatccgaacctgggagttttccctgaaacagatagtatatttgaacctgtataataatatatagtctagcgctttacggaagacaatgtatgtatttcggttcctggagaaactattgcatctattgcataggtaatcttgcacgtcgcatccccggttcattttctgcgtttccatcttgcacttcaatagcatatctttgttaacgaagcatctgtgcttcattttgtagaacaaaaatgcaacgcgagagcgctaatttttcaaacaaagaatctgagctgcatttttacagaacagaaatgcaacgcgaaagcgctattttaccaacgaagaatctgtgcttcatttttgtaaaacaaaaatgcaacgcgacgagagcgctaatttttcaaacaaagaatctgagctgcatttttacagaacagaaatgcaacgcgagagcgctattttaccaacaaagaatctatacttcttttttgttctacaaaaatgcatcccgagagcgctatttttctaacaaagcatcttagattactttttttctcctttgtgcgctctataatgcagtctcttgataactttttgcactgtaggtccgttaaggttagaagaaggctactttggtgtctattttctcttccataaaaaaagcctgactccacttcccgcgtttactgattactagcgaagctgcgggtgcattttttcaagataaaggcatccccgattatattctataccgatgtggattgcgcatactttgtgaacagaaagtgatagcgttgatgattcttcattggtcagaaaattatgaacggtttcttctattttgtctctatatactacgtataggaaatgtttacattttcgtattgttttcgattcactctatgaatagttcttactacaatttttttgtctaaagagtaatactagagataaacataaaaaatgtagaggtcgagtttagatgcaagttcaaggagcgaaaggtggatgggtaggttatatagggatatagcacagagatatatagcaaagagatacttttgagcaatgtttgtggaagcggtattcgcaatgggaagctccaccccggttgataatcagaaaagccccaaaaacaggaagattgtataagcaaatatttaaattgtaaacgttaatattttgttaaaattcgcgttaaatttttgttaaatcagctcattttttaacgaatagcccgaaatcggcaaaatcccttataaatcaaaagaatagaccgagatagggttgagtgttgttccagtttccaacaagagtccactattaaagaacgtggactccaacgtcaaagggcgaaaaagggtctatcagggcgatggcccactacgtgaaccatcaccctaatcaagttttttggggtcgaggtgccgtaaagcagtaaatcggaagggtaaacggatgcccccatttagagcttgacggggaaagccggcgaacgtggcgagaaaggaagggaagaaagcgaaaggagcgggggctagggcggtgggaagtgtaggggtcacgctgggcgtaaccaccacacccgccgcgcttaatggggcgctacagggcgcgtggggatgatccactagtacggattagaagccgccgagcgggtgacagccctccgaaggaagactctcctccgtgcgtcctcgtcttcaccggtcgcgttcctgaaacgcagatgtgcctcgcgccgcactgctccgaacaataaagattctacaatactagcttttatggttatgaagaggaaaaattggcagtaacctggccccacaaaccttcaaatgaacgaatcaaattaacaaccataggatgataatgcgattagttttttagccttatttctggggtaattaatcagcgaagcgatgatttttgatctattaacagatatataaatgcaaaaactgcataaccactttaactaatactttcaacattttcggtttgtattacttcttattcaaatgtaataaaagtatcaacaaaaaattgttaatatacctctatactttaacgtcaaggagaaaaaaccccggatcggactactagcagctgtaatacgactcactatagggaatattaagcttaaacaatgtccggagagtaccaacaacagtataacgcattcaaacaaaatccggctttattttggcttgaacaatcaaagaaaattccatggtataagatccccaaaaaggcttatactcaggacgaggacggactttaccattggttcagtgatggtcaactgaacacatgctttttggcattagatcaacatgtcgtggctggtttcggtgatcaaacggcactaatttacgatagtccagtaactcatacaaaacaaacattttcgtattcacaattgcagcaagaagttgctaaatttgcgggagtgatgcaatctctaggagttaaaaaaggtgatcgtgttgtgatctacatgccaatgatcccacaagcggttatcggtatgttagcatgcgccagaatcggagcaatccacagtgtagtgtttggtggtttcgcggcccatgagttagctgttagaatcgacgatgccaaaccaaagttaatactatcagcatcatgcggtgttgaagtatgcagcgtcattgaatataaaccattgattgacaacgctattgagctagctacacacaaggttgaacattgcatcatttatcagcgtaagcaagcgatagcaacgttgattaatgacagagacattgactggaacacagcaatgcaaacagctgttgcgacagatccggttccagttaacggaaatgatcctttatatatattatatacctcaggtaccacgggaactccaaagggcgttgttagagaaaatggcggccacgctgtggctatgaactactctatgaaaaccgtttacgacatggaacctggtgacgtgttttgggctgccagcgatattggatgggtggttggtcattcttacatcgtatatgctccgctgatgtacagatgtgctacagttttgtacgaaggcaaaccagtcagaacccctgatgcatcagctttctggagagtggttgaggaatataaagtgagtgcattattctccgccccaacagcctttagggcaatcaaaaaggaagaccctaatgcagacggctttaagcaatataacacgtctagtttaaagagattattcttagcaggcgaaagactagacccgcctacttatgaatggttgaaggaaaaaactaaattaccagttctggatcattggtggcaaacggagacaggctgggcaattgcttgcaaccctgttgggatagaatacttgacgacgaaatcaggaagctctacagtttccaccccaggtttcgacgtaagaattttagatatggacggaaatgaatgtgcagccaacgagcagggggcggttgtaattaaacttcctttacccccaggatgcttgccaaccatatggcaggatacccctagatttaaggctagttatttatctgaatacgaaggttactacttgtcaggtgatggtggttacatcgatgatgacgggtatttatttataatgggtcgtacagatgacgttattaatgtagccggtcatagattatcgacaggtgagatggaagagatcgttgcagctcatccagctgttgctgaatgtgccgtgttcgggattaatgatccattgaaagggcagttgccaatgggaatgattgttttgaaggatgattttgttggttcaaccaaggaagtcgaacaagcattggtagctgctgtaaggaatcaaattggagccatcgcttgtttaaaaaacatcgttagtgttgatagattacccaagacaaggtcggggaagattctaagaaagaacttgagacaacttgtcgatggagaggaactgcaaataccaagtacaatcgatgatgcttcgatttttgaagaaattaaccagcagttaactcagcaataactcgagcatgcatctagagggccgcatcatgtaattagttatgtcacgcttacattcacgccctccccccacatccgctctaaccgaaaaggaaggagttagacaacctgaagtctaggtccctatttatttttttatagttatgttagtattaagaacgttatttatatttcaaatttttcttttttttctgtacagacgcgtgtacgcatgtaacattatactgaaaaccttgcttgagaaggttttgggacgctcgaaggctttaatttgcggccctgcattaatgaatcggccaacgcgcggggagaggcggtttgcgtattgggcgctcttccgcttcctcgctcactgactcgctgcgctcggtcgttcggctgcggcgagcggtatcagctcactcaaaggcggtaatacggttatccacagaatcaggggataacgcaggaaagaacatgtgagcaaaaggccagcaaaagcccaggaaccgtaaaaaggccgcgttgctggcgtttttccataggctccgcccccctgacgagcatcacaaaaatcgacgctcaagtcagaggtggcgaaacccgacaggactataaagataccaggcgtttccccctggaagctccctcgtgcgctctcctgttccgaccctgccgcttaccggatacctgtccgcctttctcccttcgggaagcgtggcgctttctcatagctcacgctgtaggtatctcagttcggtgtaggtcgttcgctccaagctgggctgtgtgcacgaaccccccgttcagcccgaccgctgcgccttatccggtaactatcgtcttgagtccaacccggtaagacacgacttatcgccactggcagcagccactggtaacaggattagcagagcgaggtatgtaggcggtgctacagagttcttgaagtggtggcctaactacggctacactagaaggacagtatttggtatctgcgctctgctgaagccagttaccttcggaaaaagagttggtagctcttgatccggcaaacaaaccaccgctggtagcggtggtttttttgtttgcaagcagcagattacgcgcagaaaaaaaggatctcaagaagatcctttgatcttttctacggggtctgacgctcagtggaacgaaaactcacgttaagggattttggtcatgagattatcaaaaaggatcttcacctagatccttttaaattaaaaatgaagttttaaatcaatctaaagtatatatgagtaaacttggtctgacagttaccaatgcttaatcagtgaggcacctatctcagcgatctgtctatttcgttcatccatagttgcctgactccccgtcgtgtagataactacgatacgggagcgcttaccatctggccccagtgctgcaatgataccgcgagacccacgctcaccggctccagatttatcagcaataaaccagccagccggaagggccgagcgcagaagtggtcctgcaactttatccgcctccattcagtctattaattgttgccgggaagctagagtaagtagttcgccagttaatagtttgcgcaacgttgttggcattgctacaggcatcgtggtgtcactctcgtcgtttggtatggcttcattcagctccggttcccaacgatcaaggcgagttacatgatcccccatgttgtgcaaaaaagcggttagctccttcggtcctccgatcgttgtcagaagtaagttggccgcagtgttatcactcatggttatggcagcactgcataattctcttactgtcatgccatccgtaagatgcttttctgtgactggtgagtactcaaccaagtcattctgagaatagtgtatgcggcgaccgagttgctcttgcccggcgtcaatacgggataatagtgtatcacatagcagaactttaaaagtgctcatcattggaaaacgttcttcggggcgaaaactctcaaggatcttaccgctgttgagatccagttcgatgtaacccactcgtgcacccaactgatcttcagcatcttttactttcaccagcgtttctgggtgagcaaaaacaggaaggcaaaatgccgcaaaaaagggaataagggcgacacggaaatgttgaatactcatactcttcctttttcaatgggtaataactgatataattaaattgaagctctaatttgtgagtttagtatacatgcatttacttataatacagttttttagttttgctggccgcatcttctcaaatatgcttcccagcctgcttttctgtaacgttcaccctctaccttagcatcccttccctttgcaaatagtcctcttccaacaataataatgtcagatcctgtagagaccacatcatccacggttctatactgttgacccaatgcgtctcccttgtcatctaaacccacaccgggtgtcataatcaaccaatcgtaaccttcatctcttccacccatgtctctttgagcaataaagccgataacaaaatctttgtcgctcttcgcaatgtcaacagtacccttagtatattctccagtagatagggagcccttgcatgacaattctgctaacatcaaaaggcctctaggttcctttgttacttcttctgccgcctgcttcaaaccgctaacaatacctgggcccaccacaccgtgtgcattcgtaatgtctgcccattctgctattctgtatacacccgcagagtactgcaatttgactgtattaccaatgtcagcaaattttctgtcttcg

SEQ ID NO: 374 - DNA, 6823 bp, Artificial Sequence
  PLAS473
aagagtaaaaaattgtacttggcggataatgcctttagcggcttaactgtgccctccatggaaaaatcagtcaagatatccacatgtgtttttagtaaacaaattttgggacctaatgcttcaactaactccagtaattccttggtggtacgaacatccaatgaagcacacaagtttgtttgcttttcgtgcatgatattaaatagcttggcagcaacaggactaggatgagtagcagcacgttccttatatgtagctttcgacatgatttatcttcgtttcctgcaggtttttgttctgtgcagttgggttaagaatactgggcaatttcatgtttcttcaacactacatatgcgtatatataccaatctaagtctgtgctccttccttcgttcttccttctgttcggagattaccgaatcaaaaaaatttcaaagaaaccgaaatcaaaaaaaagaataaaaaaaaaatgatgaattgaattgaaaagctagcttatcgatgataagctgtcaaagatgagaattaattccacggactatagactatactagatactccgtctactgtacgatacacttccgctcaggtccttgtcctttaacgaggccttaccactcttttgttactctattgatccagctcagcaaaggcagtgtgatctaagattctatcttcgcgatgtagtaaaactagctagaccgagaaagagactagaaatgcaaaaggcacttctacaatggctgccatcattattatccgatgtgacgctgcagcttctcaatgatattcgaatacgctttgaggagatacagcctaatatccgacaaactgttttacagatttacgatcgtacttgttacccatcattgaattttgaacatccgaacctgggagttttccctgaaacagatagtatatttgaacctgtataataatatatagtctagcgctttacggaagacaatgtatgtatttcggttcctggagaaactattgcatctattgcataggtaatcttgcacgtcgcatccccggttcattttctgcgtttccatcttgcacttcaatagcatatctttgttaacgaagcatctgtgcttcattttgtagaacaaaaatgcaacgcgagagcgctaatttttcaaacaaagaatctgagctgcatttttacagaacagaaatgcaacgcgaaagcgctattttaccaacgaagaatctgtgcttcatttttgtaaaacaaaaatgcaacgcgacgagagcgctaatttttcaaacaaagaatctgagctgcatttttacagaacagaaatgcaacgcgagagcgctattttaccaacaaagaatctatacttcttttttgttctacaaaaatgcatcccgagagcgctatttttctaacaaagcatcttagattactttttttctcctttgtgcgctctataatgcagtctcttgataactttttgcactgtaggtccgttaaggttagaagaaggctactttggtgtctattttctcttccataaaaaaagcctgactccacttcccgcgtttactgattactagcgaagctgcgggtgcattttttcaagataaaggcatccccgattatattctataccgatgtggattgcgcatactttgtgaacagaaagtgatagcgttgatgattcttcattggtcagaaaattatgaacggtttcttctattttgtctctatatactacgtataggaaatgtttacattttcgtattgttttcgattcactctatgaatagttcttactacaatttttttgtctaaagagtaatactagagataaacataaaaaatgtagaggtcgagtttagatgcaagttcaaggagcgaaaggtggatgggtaggttatatagggatatagcacagagatatatagcaaagagatacttttgagcaatgtttgtggaagcggtattcgcaatgggaagctccaccccggttgataatcagaaaagccccaaaaacaggaagattgtataagcaaatatttaaattgtaaacgttaatattttgttaaaattcgcgttaaatttttgttaaatcagctcattttttaacgaatagcccgaaatcggcaaaatcccttataaatcaaaagaatagaccgagatagggttgagtgttgttccagtttccaacaagagtccactattaaagaacgtggactccaacgtcaaagggcgaaaaagggtctatcagggcgatggcccactacgtgaaccatcaccctaatcaagttttttggggtcgaggtgccgtaaagcagtaaatcggaagggtaaacggatgcccccatttagagcttgacggggaaagccggcgaacgtggcgagaaaggaagggaagaaagcgaaaggagcgggggctagggcggtgggaagtgtaggggtcacgctgggcgtaaccaccacacccgccgcgcttaatggggcgctacagggcgcgtggggatgatccactagtacggattagaagccgccgagcgggtgacagccctccgaaggaagactctcctccgtgcgtcctcgtcttcaccggtcgcgttcctgaaacgcagatgtgcctcgcgccgcactgctccgaacaataaagattctacaatactagcttttatggttatgaagaggaaaaattggcagtaacctggccccacaaaccttcaaatgaacgaatcaaattaacaaccataggatgataatgcgattagttttttagccttatttctggggtaattaatcagcgaagcgatgatttttgatctattaacagatatataaatgcaaaaactgcataaccactttaactaatactttcaacattttcggtttgtattacttcttattcaaatgtaataaaagtatcaacaaaaaattgttaatatacctctatactttaacgtcaaggagaaaaaaccccggatcggactactagcagctgtaatacgactcactatagggaatattaagcttaaacaatgtccacagaattgaaaaaaaaattcaatagaatatgtgacaaaagcatgattaaaaaaaggtattcccatcttaccgaggagatgattgaagaacaccctaatatcggtgcctacatggcaccgtccctaaatattagacaggaaattatcacggcagaagttccgaaattaggtaaagaagctgcactgaaagccctaaaagaatggggacaacctaagtctaaaatcacacatttggttttttgtactacatctggtgtagagatgccaggtgctgattacaagttagctaacttgcttggtctggaaaccagcgttagaagagtcatgctatatcatcagggatgctacgctggtggtacagtattgagaactgcgaaagatttagctgagaacaatgctggagcaagggtgctggttgtttgctcagaaatcaccgttgttaccttcagaggcccatccgaaacagctttagactctttagtcggtcaagcgttatttggtgatgggtctgcggctgtgatcgtaggctcggaccccgatttgtccatcgaaagacctttatttcaattggtctctgccgctcaaaccttcattccgaatacgcaaggtgctatagcaggtaaccttagagaagtgggtttgacttttcacctttggcccaatgttcctactttaatttctgagaacatcgaaaaatgcttaacccaagcctttgacccaataggcatcaatgattggaattctctattctggatcgcacaccctggtggacctgccattctagatgcggtagaagccaagcttagcctagataaacaaaaattgaaagctactagacatgtcctttcagaatacggaaatatgtctagcgcatgcgtcttgttcatcatggatgaaatgaggaaaaagagtttgaaagagcaaaagacgactaccggtgaaggtttagattggggtgttctattcggtttcggtccaggtctgactattgaaacggtagtgctgcattctattcctagagattcgaactaactcgagcatgcatctagagggccgcatcatgtaattagttatgtcacgcttacattcacgccctccccccacatccgctctaaccgaaaaggaaggagttagacaacctgaagtctaggtccctatttatttttttatagttatgttagtattaagaacgttatttatatttcaaatttttcttttttttctgtacagacgcgtgtacgcatgtaacattatactgaaaaccttgcttgagaaggttttgggacgctcgaaggctttaatttgcggccctgcattaatgaatcggccaacgcgcggggagaggcggtttgcgtattgggcgctcttccgcttcctcgctcactgactcgctgcgctcggtcgttcggctgcggcgagcggtatcagctcactcaaaggcggtaatacggttatccacagaatcaggggataacgcaggaaagaacatgtgagcaaaaggccagcaaaagcccaggaaccgtaaaaaggccgcgttgctggcgtttttccataggctccgcccccctgacgagcatcacaaaaatcgacgctcaagtcagaggtggcgaaacccgacaggactataaagataccaggcgtttccccctggaagctccctcgtgcgctctcctgttccgaccctgccgcttaccggatacctgtccgcctttctcccttcgggaagcgtggcgctttctcatagctcacgctgtaggtatctcagttcggtgtaggtcgttcgctccaagctgggctgtgtgcacgaaccccccgttcagcccgaccgctgcgccttatccggtaactatcgtcttgagtccaacccggtaagacacgacttatcgccactggcagcagccactggtaacaggattagcagagcgaggtatgtaggcggtgctacagagttcttgaagtggtggcctaactacggctacactagaaggacagtatttggtatctgcgctctgctgaagccagttaccttcggaaaaagagttggtagctcttgatccggcaaacaaaccaccgctggtagcggtggtttttttgtttgcaagcagcagattacgcgcagaaaaaaaggatctcaagaagatcctttgatcttttctacggggtctgacgctcagtggaacgaaaactcacgttaagggattttggtcatgagattatcaaaaaggatcttcacctagatccttttaaattaaaaatgaagttttaaatcaatctaaagtatatatgagtaaacttggtctgacagttaccaatgcttaatcagtgaggcacctatctcagcgatctgtctatttcgttcatccatagttgcctgactccccgtcgtgtagataactacgatacgggagcgcttaccatctggccccagtgctgcaatgataccgcgagacccacgctcaccggctccagatttatcagcaataaaccagccagccggaagggccgagcgcagaagtggtcctgcaactttatccgcctccattcagtctattaattgttgccgggaagctagagtaagtagttcgccagttaatagtttgcgcaacgttgttggcattgctacaggcatcgtggtgtcactctcgtcgtttggtatggcttcattcagctccggttcccaacgatcaaggcgagttacatgatcccccatgttgtgcaaaaaagcggttagctccttcggtcctccgatcgttgtcagaagtaagttggccgcagtgttatcactcatggttatggcagcactgcataattctcttactgtcatgccatccgtaagatgcttttctgtgactggtgagtactcaaccaagtcattctgagaatagtgtatgcggcgaccgagttgctcttgcccggcgtcaatacgggataatagtgtatcacatagcagaactttaaaagtgctcatcattggaaaacgttcttcggggcgaaaactctcaaggatcttaccgctgttgagatccagttcgatgtaacccactcgtgcacccaactgatcttcagcatcttttactttcaccagcgtttctgggtgagcaaaaacaggaaggcaaaatgccgcaaaaaagggaataagggcgacacggaaatgttgaatactcatactcttcctttttcaatgggtaataactgatataattaaattgaagctctaatttgtgagtttagtatacatgcatttacttataatacagttttttagttttgctggccgcatcttctcaaatatgcttcccagcctgcttttctgtaacgttcaccctctaccttagcatcccttccctttgcaaatagtcctcttccaacaataataatgtcagatcctgtagagaccacatcatccacggttctatactgttgacccaatgcgtctcccttgtcatctaaacccacaccgggtgtcataatcaaccaatcgtaaccttcatctcttccacccatgtctctttgagcaataaagccgataacaaaatctttgtcgctcttcgcaatgtcaacagtacccttagtatattctccagtagatagggagcccttgcatgacaattctgctaacatcaaaaggcctctaggttcctttgttacttcttctgccgcctgcttcaaaccgctaacaatacctgggcccaccacaccgtgtgcattcgtaatgtctgcccattctgctattctgtatacacccgcagagtactgcaatttgactgtattaccaatgtcagcaaattttctgtcttcg

SEQ ID NO: 375 - DNA, 7069 bp, Artificial Sequence
  PLAS474
aagagtaaaaaattgtacttggcggataatgcctttagcggcttaactgtgccctccatggaaaaatcagtcaagatatccacatgtgtttttagtaaacaaattttgggacctaatgcttcaactaactccagtaattccttggtggtacgaacatccaatgaagcacacaagtttgtttgcttttcgtgcatgatattaaatagcttggcagcaacaggactaggatgagtagcagcacgttccttatatgtagctttcgacatgatttatcttcgtttcctgcaggtttttgttctgtgcagttgggttaagaatactgggcaatttcatgtttcttcaacactacatatgcgtatatataccaatctaagtctgtgctccttccttcgttcttccttctgttcggagattaccgaatcaaaaaaatttcaaagaaaccgaaatcaaaaaaaagaataaaaaaaaaatgatgaattgaattgaaaagctagcttatcgatgataagctgtcaaagatgagaattaattccacggactatagactatactagatactccgtctactgtacgatacacttccgctcaggtccttgtcctttaacgaggccttaccactcttttgttactctattgatccagctcagcaaaggcagtgtgatctaagattctatcttcgcgatgtagtaaaactagctagaccgagaaagagactagaaatgcaaaaggcacttctacaatggctgccatcattattatccgatgtgacgctgcagcttctcaatgatattcgaatacgctttgaggagatacagcctaatatccgacaaactgttttacagatttacgatcgtacttgttacccatcattgaattttgaacatccgaacctgggagttttccctgaaacagatagtatatttgaacctgtataataatatatagtctagcgctttacggaagacaatgtatgtatttcggttcctggagaaactattgcatctattgcataggtaatcttgcacgtcgcatccccggttcattttctgcgtttccatcttgcacttcaatagcatatctttgttaacgaagcatctgtgcttcattttgtagaacaaaaatgcaacgcgagagcgctaatttttcaaacaaagaatctgagctgcatttttacagaacagaaatgcaacgcgaaagcgctattttaccaacgaagaatctgtgcttcatttttgtaaaacaaaaatgcaacgcgacgagagcgctaatttttcaaacaaagaatctgagctgcatttttacagaacagaaatgcaacgcgagagcgctattttaccaacaaagaatctatacttcttttttgttctacaaaaatgcatcccgagagcgctatttttctaacaaagcatcttagattactttttttctcctttgtgcgctctataatgcagtctcttgataactttttgcactgtaggtccgttaaggttagaagaaggctactttggtgtctattttctcttccataaaaaaagcctgactccacttcccgcgtttactgattactagcgaagctgcgggtgcattttttcaagataaaggcatccccgattatattctataccgatgtggattgcgcatactttgtgaacagaaagtgatagcgttgatgattcttcattggtcagaaaattatgaacggtttcttctattttgtctctatatactacgtataggaaatgtttacattttcgtattgttttcgattcactctatgaatagttcttactacaatttttttgtctaaagagtaatactagagataaacataaaaaatgtagaggtcgagtttagatgcaagttcaaggagcgaaaggtggatgggtaggttatatagggatatagcacagagatatatagcaaagagatacttttgagcaatgtttgtggaagcggtattcgcaatgggaagctccaccccggttgataatcagaaaagccccaaaaacaggaagattgtataagcaaatatttaaattgtaaacgttaatattttgttaaaattcgcgttaaatttttgttaaatcagctcattttttaacgaatagcccgaaatcggcaaaatcccttataaatcaaaagaatagaccgagatagggttgagtgttgttccagtttccaacaagagtccactattaaagaacgtggactccaacgtcaaagggcgaaaaagggtctatcagggcgatggcccactacgtgaaccatcaccctaatcaagttttttggggtcgaggtgccgtaaagcagtaaatcggaagggtaaacggatgcccccatttagagcttgacggggaaagccggcgaacgtggcgagaaaggaagggaagaaagcgaaaggagcgggggctagggcggtgggaagtgtaggggtcacgctgggcgtaaccaccacacccgccgcgcttaatggggcgctacagggcgcgtggggatgatccactagtacggattagaagccgccgagcgggtgacagccctccgaaggaagactctcctccgtgcgtcctcgtcttcaccggtcgcgttcctgaaacgcagatgtgcctcgcgccgcactgctccgaacaataaagattctacaatactagcttttatggttatgaagaggaaaaattggcagtaacctggccccacaaaccttcaaatgaacgaatcaaattaacaaccataggatgataatgcgattagttttttagccttatttctggggtaattaatcagcgaagcgatgatttttgatctattaacagatatataaatgcaaaaactgcataaccactttaactaatactttcaacattttcggtttgtattacttcttattcaaatgtaataaaagtatcaacaaaaaattgttaatatacctctatactttaacgtcaaggagaaaaaaccccggatcggactactagcagctgtaatacgactcactatagggaatattaagcttaaacaatggcttcagttgatgaaatcagaaacgcccagagggccaaagggcctgctacggtattagccatcggtacggctacaccagataattgcttgtaccaatcggattttgcagattactattttcgtgtcaccaagtcagaacatatgacagagctgaaaaagaaatttaacagaatttgtgataaatcaatgataaagaaaaggtacattcatcttactgaagaaatgttggaagaacatccaaacataggtgcttacatggcaccgtctttgaatattagacaggagattattacaacggaagtcccaaagttaggcaaggaggctgcgttaaaagccttaaaagagtggggtcaaccaatttctaaaataacacacttagtattttgcacaacttcgggagtagaaatgccaggcgcagattacaagctagcgaatctgttaggtcttgaaccttctgtgagaagagttatgctttatcaccagggttgttacgctggtggtacagtcctgagaacagcaaaagatctagccgaaaacaatgcgggagcaagggttttggtagtttgcagtgaaattacagtggtaacattccgtggcccatcagaatcagcactggattctttggtgggtcaagctttgtttggtgatggtagcgctgctatgataattggttcggaccccgatattagtatcgaaagacctttatttcagctagtttcagctgctcaaacgttcataccaaatacgcaaggtgctatagctggtaacttaagggaagttggacttacttttcatttatggccaaacgttcctaccttgatatctgaaaacatagaaaagtgtttgacccaggcatttgacccgctgggtatttccgattggaattctctattctggattgcacatcccggagggcctgctatattggatgctgtcgaagctaagttgtcgcttgacaagcaaaagcttaacgcaacgagacacattttaagtgaatatggtaacatgagttccgcgtgcgtgcttttcattcttgatgaaatgcgtaagaagagccttaaagaaggtaagacaactacaggcgaaggtttggactggggtgttttattcggctttgggcctggtttaaccattgagaccgtgcgtaaacaaacactgtcatttttgctaatgatgttgcctggcagatacgaatttatatgctcttatcaaatgatcaagtcatttagtattttttattcttttaagccatggttaaaaaagagattggaaggtaactaactcgagcatgcatctagagggccgcatcatgtaattagttatgtcacgcttacattcacgccctccccccacatccgctctaaccgaaaaggaaggagttagacaacctgaagtctaggtccctatttatttttttatagttatgttagtattaagaacgttatttatatttcaaatttttcttttttttctgtacagacgcgtgtacgcatgtaacattatactgaaaaccttgcttgagaaggttttgggacgctcgaaggctttaatttgcggccctgcattaatgaatcggccaacgcgcggggagaggcggtttgcgtattgggcgctcttccgcttcctcgctcactgactcgctgcgctcggtcgttcggctgcggcgagcggtatcagctcactcaaaggcggtaatacggttatccacagaatcaggggataacgcaggaaagaacatgtgagcaaaaggccagcaaaagcccaggaaccgtaaaaaggccgcgttgctggcgtttttccataggctccgcccccctgacgagcatcacaaaaatcgacgctcaagtcagaggtggcgaaacccgacaggactataaagataccaggcgtttccccctggaagctccctcgtgcgctctcctgttccgaccctgccgcttaccggatacctgtccgcctttctcccttcgggaagcgtggcgctttctcatagctcacgctgtaggtatctcagttcggtgtaggtcgttcgctccaagctgggctgtgtgcacgaaccccccgttcagcccgaccgctgcgccttatccggtaactatcgtcttgagtccaacccggtaagacacgacttatcgccactggcagcagccactggtaacaggattagcagagcgaggtatgtaggcggtgctacagagttcttgaagtggtggcctaactacggctacactagaaggacagtatttggtatctgcgctctgctgaagccagttaccttcggaaaaagagttggtagctcttgatccggcaaacaaaccaccgctggtagcggtggtttttttgtttgcaagcagcagattacgcgcagaaaaaaaggatctcaagaagatcctttgatcttttctacggggtctgacgctcagtggaacgaaaactcacgttaagggattttggtcatgagattatcaaaaaggatcttcacctagatccttttaaattaaaaatgaagttttaaatcaatctaaagtatatatgagtaaacttggtctgacagttaccaatgcttaatcagtgaggcacctatctcagcgatctgtctatttcgttcatccatagttgcctgactccccgtcgtgtagataactacgatacgggagcgcttaccatctggccccagtgctgcaatgataccgcgagacccacgctcaccggctccagatttatcagcaataaaccagccagccggaagggccgagcgcagaagtggtcctgcaactttatccgcctccattcagtctattaattgttgccgggaagctagagtaagtagttcgccagttaatagtttgcgcaacgttgttggcattgctacaggcatcgtggtgtcactctcgtcgtttggtatggcttcattcagctccggttcccaacgatcaaggcgagttacatgatcccccatgttgtgcaaaaaagcggttagctccttcggtcctccgatcgttgtcagaagtaagttggccgcagtgttatcactcatggttatggcagcactgcataattctcttactgtcatgccatccgtaagatgcttttctgtgactggtgagtactcaaccaagtcattctgagaatagtgtatgcggcgaccgagttgctcttgcccggcgtcaatacgggataatagtgtatcacatagcagaactttaaaagtgctcatcattggaaaacgttcttcggggcgaaaactctcaaggatcttaccgctgttgagatccagttcgatgtaacccactcgtgcacccaactgatcttcagcatcttttactttcaccagcgtttctgggtgagcaaaaacaggaaggcaaaatgccgcaaaaaagggaataagggcgacacggaaatgttgaatactcatactcttcctttttcaatgggtaataactgatataattaaattgaagctctaatttgtgagtttagtatacatgcatttacttataatacagttttttagttttgctggccgcatcttctcaaatatgcttcccagcctgcttttctgtaacgttcaccctctaccttagcatcccttccctttgcaaatagtcctcttccaacaataataatgtcagatcctgtagagaccacatcatccacggttctatactgttgacccaatgcgtctcccttgtcatctaaacccacaccgggtgtcataatcaaccaatcgtaaccttcatctcttccacccatgtctctttgagcaataaagccgataacaaaatctttgtcgctcttcgcaatgtcaacagtacccttagtatattctccagtagatagggagcccttgcatgacaattctgctaacatcaaaaggcctctaggttcctttgttacttcttctgccgcctgcttcaaaccgctaacaatacctgggcccaccacaccgtgtgcattcgtaatgtctgcccattctgctattctgtatacacccgcagagtactgcaatttgactgtattaccaatgtcagcaaattttctgtcttcg

SEQ ID NO: 376 - DNA, 6778 bp, Artificial Sequence
  PLAS475
aagagtaaaaaattgtacttggcggataatgcctttagcggcttaactgtgccctccatggaaaaatcagtcaagatatccacatgtgtttttagtaaacaaattttgggacctaatgcttcaactaactccagtaattccttggtggtacgaacatccaatgaagcacacaagtttgtttgcttttcgtgcatgatattaaatagcttggcagcaacaggactaggatgagtagcagcacgttccttatatgtagctttcgacatgatttatcttcgtttcctgcaggtttttgttctgtgcagttgggttaagaatactgggcaatttcatgtttcttcaacactacatatgcgtatatataccaatctaagtctgtgctccttccttcgttcttccttctgttcggagattaccgaatcaaaaaaatttcaaagaaaccgaaatcaaaaaaaagaataaaaaaaaaatgatgaattgaattgaaaagctagcttatcgatgataagctgtcaaagatgagaattaattccacggactatagactatactagatactccgtctactgtacgatacacttccgctcaggtccttgtcctttaacgaggccttaccactcttttgttactctattgatccagctcagcaaaggcagtgtgatctaagattctatcttcgcgatgtagtaaaactagctagaccgagaaagagactagaaatgcaaaaggcacttctacaatggctgccatcattattatccgatgtgacgctgcagcttctcaatgatattcgaatacgctttgaggagatacagcctaatatccgacaaactgttttacagatttacgatcgtacttgttacccatcattgaattttgaacatccgaacctgggagttttccctgaaacagatagtatatttgaacctgtataataatatatagtctagcgctttacggaagacaatgtatgtatttcggttcctggagaaactattgcatctattgcataggtaatcttgcacgtcgcatccccggttcattttctgcgtttccatcttgcacttcaatagcatatctttgttaacgaagcatctgtgcttcattttgtagaacaaaaatgcaacgcgagagcgctaatttttcaaacaaagaatctgagctgcatttttacagaacagaaatgcaacgcgaaagcgctattttaccaacgaagaatctgtgcttcatttttgtaaaacaaaaatgcaacgcgacgagagcgctaatttttcaaacaaagaatctgagctgcatttttacagaacagaaatgcaacgcgagagcgctattttaccaacaaagaatctatacttcttttttgttctacaaaaatgcatcccgagagcgctatttttctaacaaagcatcttagattactttttttctcctttgtgcgctctataatgcagtctcttgataactttttgcactgtaggtccgttaaggttagaagaaggctactttggtgtctattttctcttccataaaaaaagcctgactccacttcccgcgtttactgattactagcgaagctgcgggtgcattttttcaagataaaggcatccccgattatattctataccgatgtggattgcgcatactttgtgaacagaaagtgatagcgttgatgattcttcattggtcagaaaattatgaacggtttcttctattttgtctctatatactacgtataggaaatgtttacattttcgtattgttttcgattcactctatgaatagttcttactacaatttttttgtctaaagagtaatactagagataaacataaaaaatgtagaggtcgagtttagatgcaagttcaaggagcgaaaggtggatgggtaggttatatagggatatagcacagagatatatagcaaagagatacttttgagcaatgtttgtggaagcggtattcgcaatgggaagctccaccccggttgataatcagaaaagccccaaaaacaggaagattgtataagcaaatatttaaattgtaaacgttaatattttgttaaaattcgcgttaaatttttgttaaatcagctcattttttaacgaatagcccgaaatcggcaaaatcccttataaatcaaaagaatagaccgagatagggttgagtgttgttccagtttccaacaagagtccactattaaagaacgtggactccaacgtcaaagggcgaaaaagggtctatcagggcgatggcccactacgtgaaccatcaccctaatcaagttttttggggtcgaggtgccgtaaagcagtaaatcggaagggtaaacggatgcccccatttagagcttgacggggaaagccggcgaacgtggcgagaaaggaagggaagaaagcgaaaggagcgggggctagggcggtgggaagtgtaggggtcacgctgggcgtaaccaccacacccgccgcgcttaatggggcgctacagggcgcgtggggatgatccactagtacggattagaagccgccgagcgggtgacagccctccgaaggaagactctcctccgtgcgtcctcgtcttcaccggtcgcgttcctgaaacgcagatgtgcctcgcgccgcactgctccgaacaataaagattctacaatactagcttttatggttatgaagaggaaaaattggcagtaacctggccccacaaaccttcaaatgaacgaatcaaattaacaaccataggatgataatgcgattagttttttagccttatttctggggtaattaatcagcgaagcgatgatttttgatctattaacagatatataaatgcaaaaactgcataaccactttaactaatactttcaacattttcggtttgtattacttcttattcaaatgtaataaaagtatcaacaaaaaattgttaatatacctctatactttaacgtcaaggagaaaaaaccccggatcggactactagcagctgtaatacgactcactatagggaatattaagcttaaacaatgtctattaaaaaaagatattcccatctgacggaagaaatgctggaagaacatcctaatatcggggcttacatggcaccatcgttgaacatcagacaggaaatcattacggctgaagtccctaaattgggaaaagaagcagcgttgaaggcacttaaagagtggggtcagccaaaatcaaaaattacacatttggtattctgcactacttctggtgttgagatgccaggcgccgattacaaattggcaaaccttttaggtcttgagacctctgttagaagagttatgctgtaccatcaaggttgttatgccggcggtaccgtactaagaactgccaaggatttggcagaaaataatgcaggtgcaagagtgttggttgtttgctccgaaattacagtggttacgtttagagggccttctgaaaccgctcttgattcattggttggtcaggcgttgtttggtgatggttctgccactgtgattgttggttccgatccggatttaagtatcgagaggccattatttcagctagtatctgcagcccaaaccttcattcccaatacgcaaggcgcgatagctggaaacttgagagaagttggtcttacctttcatttatggccaaatgtgccaacattgataagcgaaaatattgaaaaatgcctaaaccaagctttcgatcctatcgggattaacgattggaacagcttgttttggatagcccaccctggggggcctgctatcttaaatgcagttgaagcgaagctgtctcttgataaacagaaactaaaggctactcgtcacgtgttaagcgaatacggaaatatgagttctgcttgtgtgctttttattatggatgaaatgaggaaaaaaagtttgaaagaacaaaagactacaacaggggaagggttagattggggtgttctgttcggtttcggtccgggtctaacaattgaaactgtggttttgcacagtatcccaagagatagtaactgactcgagcatgcatctagagggccgcatcatgtaattagttatgtcacgcttacattcacgccctccccccacatccgctctaaccgaaaaggaaggagttagacaacctgaagtctaggtccctatttatttttttatagttatgttagtattaagaacgttatttatatttcaaatttttcttttttttctgtacagacgcgtgtacgcatgtaacattatactgaaaaccttgcttgagaaggttttgggacgctcgaaggctttaatttgcggccctgcattaatgaatcggccaacgcgcggggagaggcggtttgcgtattgggcgctcttccgcttcctcgctcactgactcgctgcgctcggtcgttcggctgcggcgagcggtatcagctcactcaaaggcggtaatacggttatccacagaatcaggggataacgcaggaaagaacatgtgagcaaaaggccagcaaaagcccaggaaccgtaaaaaggccgcgttgctggcgtttttccataggctccgcccccctgacgagcatcacaaaaatcgacgctcaagtcagaggtggcgaaacccgacaggactataaagataccaggcgtttccccctggaagctccctcgtgcgctctcctgttccgaccctgccgcttaccggatacctgtccgcctttctcccttcgggaagcgtggcgctttctcatagctcacgctgtaggtatctcagttcggtgtaggtcgttcgctccaagctgggctgtgtgcacgaaccccccgttcagcccgaccgctgcgccttatccggtaactatcgtcttgagtccaacccggtaagacacgacttatcgccactggcagcagccactggtaacaggattagcagagcgaggtatgtaggcggtgctacagagttcttgaagtggtggcctaactacggctacactagaaggacagtatttggtatctgcgctctgctgaagccagttaccttcggaaaaagagttggtagctcttgatccggcaaacaaaccaccgctggtagcggtggtttttttgtttgcaagcagcagattacgcgcagaaaaaaaggatctcaagaagatcctttgatcttttctacggggtctgacgctcagtggaacgaaaactcacgttaagggattttggtcatgagattatcaaaaaggatcttcacctagatccttttaaattaaaaatgaagttttaaatcaatctaaagtatatatgagtaaacttggtctgacagttaccaatgcttaatcagtgaggcacctatctcagcgatctgtctatttcgttcatccatagttgcctgactccccgtcgtgtagataactacgatacgggagcgcttaccatctggccccagtgctgcaatgataccgcgagacccacgctcaccggctccagatttatcagcaataaaccagccagccggaagggccgagcgcagaagtggtcctgcaactttatccgcctccattcagtctattaattgttgccgggaagctagagtaagtagttcgccagttaatagtttgcgcaacgttgttggcattgctacaggcatcgtggtgtcactctcgtcgtttggtatggcttcattcagctccggttcccaacgatcaaggcgagttacatgatcccccatgttgtgcaaaaaagcggttagctccttcggtcctccgatcgttgtcagaagtaagttggccgcagtgttatcactcatggttatggcagcactgcataattctcttactgtcatgccatccgtaagatgcttttctgtgactggtgagtactcaaccaagtcattctgagaatagtgtatgcggcgaccgagttgctcttgcccggcgtcaatacgggataatagtgtatcacatagcagaactttaaaagtgctcatcattggaaaacgttcttcggggcgaaaactctcaaggatcttaccgctgttgagatccagttcgatgtaacccactcgtgcacccaactgatcttcagcatcttttactttcaccagcgtttctgggtgagcaaaaacaggaaggcaaaatgccgcaaaaaagggaataagggcgacacggaaatgttgaatactcatactcttcctttttcaatgggtaataactgatataattaaattgaagctctaatttgtgagtttagtatacatgcatttacttataatacagttttttagttttgctggccgcatcttctcaaatatgcttcccagcctgcttttctgtaacgttcaccctctaccttagcatcccttccctttgcaaatagtcctcttccaacaataataatgtcagatcctgtagagaccacatcatccacggttctatactgttgacccaatgcgtctcccttgtcatctaaacccacaccgggtgtcataatcaaccaatcgtaaccttcatctcttccacccatgtctctttgagcaataaagccgataacaaaatctttgtcgctcttcgcaatgtcaacagtacccttagtatattctccagtagatagggagcccttgcatgacaattctgctaacatcaaaaggcctctaggttcctttgttacttcttctgccgcctgcttcaaaccgctaacaatacctgggcccaccacaccgtgtgcattcgtaatgtctgcccattctgctattctgtatacacccgcagagtactgcaatttgactgtattaccaatgtcagcaaattttctgtcttcg

SEQ ID NO: 377 - DNA, 6877 bp, Artificial Sequence
  PLAS476
aagagtaaaaaattgtacttggcggataatgcctttagcggcttaactgtgccctccatggaaaaatcagtcaagatatccacatgtgtttttagtaaacaaattttgggacctaatgcttcaactaactccagtaattccttggtggtacgaacatccaatgaagcacacaagtttgtttgcttttcgtgcatgatattaaatagcttggcagcaacaggactaggatgagtagcagcacgttccttatatgtagctttcgacatgatttatcttcgtttcctgcaggtttttgttctgtgcagttgggttaagaatactgggcaatttcatgtttcttcaacactacatatgcgtatatataccaatctaagtctgtgctccttccttcgttcttccttctgttcggagattaccgaatcaaaaaaatttcaaagaaaccgaaatcaaaaaaaagaataaaaaaaaaatgatgaattgaattgaaaagctagcttatcgatgataagctgtcaaagatgagaattaattccacggactatagactatactagatactccgtctactgtacgatacacttccgctcaggtccttgtcctttaacgaggccttaccactcttttgttactctattgatccagctcagcaaaggcagtgtgatctaagattctatcttcgcgatgtagtaaaactagctagaccgagaaagagactagaaatgcaaaaggcacttctacaatggctgccatcattattatccgatgtgacgctgcagcttctcaatgatattcgaatacgctttgaggagatacagcctaatatccgacaaactgttttacagatttacgatcgtacttgttacccatcattgaattttgaacatccgaacctgggagttttccctgaaacagatagtatatttgaacctgtataataatatatagtctagcgctttacggaagacaatgtatgtatttcggttcctggagaaactattgcatctattgcataggtaatcttgcacgtcgcatccccggttcattttctgcgtttccatcttgcacttcaatagcatatctttgttaacgaagcatctgtgcttcattttgtagaacaaaaatgcaacgcgagagcgctaatttttcaaacaaagaatctgagctgcatttttacagaacagaaatgcaacgcgaaagcgctattttaccaacgaagaatctgtgcttcatttttgtaaaacaaaaatgcaacgcgacgagagcgctaatttttcaaacaaagaatctgagctgcatttttacagaacagaaatgcaacgcgagagcgctattttaccaacaaagaatctatacttcttttttgttctacaaaaatgcatcccgagagcgctatttttctaacaaagcatcttagattactttttttctcctttgtgcgctctataatgcagtctcttgataactttttgcactgtaggtccgttaaggttagaagaaggctactttggtgtctattttctcttccataaaaaaagcctgactccacttcccgcgtttactgattactagcgaagctgcgggtgcattttttcaagataaaggcatccccgattatattctataccgatgtggattgcgcatactttgtgaacagaaagtgatagcgttgatgattcttcattggtcagaaaattatgaacggtttcttctattttgtctctatatactacgtataggaaatgtttacattttcgtattgttttcgattcactctatgaatagttcttactacaatttttttgtctaaagagtaatactagagataaacataaaaaatgtagaggtcgagtttagatgcaagttcaaggagcgaaaggtggatgggtaggttatatagggatatagcacagagatatatagcaaagagatacttttgagcaatgtttgtggaagcggtattcgcaatgggaagctccaccccggttgataatcagaaaagccccaaaaacaggaagattgtataagcaaatatttaaattgtaaacgttaatattttgttaaaattcgcgttaaatttttgttaaatcagctcattttttaacgaatagcccgaaatcggcaaaatcccttataaatcaaaagaatagaccgagatagggttgagtgttgttccagtttccaacaagagtccactattaaagaacgtggactccaacgtcaaagggcgaaaaagggtctatcagggcgatggcccactacgtgaaccatcaccctaatcaagttttttggggtcgaggtgccgtaaagcagtaaatcggaagggtaaacggatgcccccatttagagcttgacggggaaagccggcgaacgtggcgagaaaggaagggaagaaagcgaaaggagcgggggctagggcggtgggaagtgtaggggtcacgctgggcgtaaccaccacacccgccgcgcttaatggggcgctacagggcgcgtggggatgatccactagtacggattagaagccgccgagcgggtgacagccctccgaaggaagactctcctccgtgcgtcctcgtcttcaccggtcgcgttcctgaaacgcagatgtgcctcgcgccgcactgctccgaacaataaagattctacaatactagcttttatggttatgaagaggaaaaattggcagtaacctggccccacaaaccttcaaatgaacgaatcaaattaacaaccataggatgataatgcgattagttttttagccttatttctggggtaattaatcagcgaagcgatgatttttgatctattaacagatatataaatgcaaaaactgcataaccactttaactaatactttcaacattttcggtttgtattacttcttattcaaatgtaataaaagtatcaacaaaaaattgttaatatacctctatactttaacgtcaaggagaaaaaaccccggatcggactactagcagctgtaatacgactcactatagggaatattaagcttaaacaatggcatcggtcgaggaaattcgtaatgcgcaaagagccaaaggtcctgcaacagtgcttgcaatcggcaccgccacgccagataattgcgacaaaagtatgatcaaaaaaaggtatatacatttcaccgaagaaatgttggaagaacatccaaatataggcgcgtatatggcccccagtttaaatattagacaagaaataattactgcggaagttccaaagctgggtaaggaagccactttgaaggcactgaaagagtggggacagccaaaatctaagattactcatctagttttctgcacaacatctggtgttgaaatgccaggagccgactacaaactggccaatttgttgtccttagaaccttcagtaaggagggttatgctttatcatcaagggtgttacgcaggcggaactgtattaagaactgcaaaagacttagctgaaaataacgctggtgcgagagttctggtagtatgtagcgagattaccgttgtgacgtttagaggaccatctgaggttgcactagattccctggttggtcaagctttatttggggatggttctgcagtagtaatcatcggttcggatccagacatatcgattgaaagaccactgttccaactggttagtgccgcacaaacctttattccgaacactcaaggtgccattgcgggcaatctgcgtgaggttggattaacattccacttgtggccaaatgtcccaactctaatctctgaaaacattgaaaaatgcctaacacaagctttcgatcctttaggtataagtgactggaacagtctattttggattgctcacccaggtggtcctgctatcttgaatgccatcgaagcaaaattgggacttgataaacagaaattaaaagctacaagacatatcttatcagaatatggtaacatgagttcagcctgcgtgttgtttatattggatgaaatgagaaagaaatctctgaaagaagggaagacaacaaccggtgaaggtttggactggggtgtcttgtttggtttcggcccaggattaacaattgaaactgtcgttcttcaacactccatctgtatggactctaactagctcgagcatgcatctagagggccgcatcatgtaattagttatgtcacgcttacattcacgccctccccccacatccgctctaaccgaaaaggaaggagttagacaacctgaagtctaggtccctatttatttttttatagttatgttagtattaagaacgttatttatatttcaaatttttcttttttttctgtacagacgcgtgtacgcatgtaacattatactgaaaaccttgcttgagaaggttttgggacgctcgaaggctttaatttgcggccctgcattaatgaatcggccaacgcgcggggagaggcggtttgcgtattgggcgctcttccgcttcctcgctcactgactcgctgcgctcggtcgttcggctgcggcgagcggtatcagctcactcaaaggcggtaatacggttatccacagaatcaggggataacgcaggaaagaacatgtgagcaaaaggccagcaaaagcccaggaaccgtaaaaaggccgcgttgctggcgtttttccataggctccgcccccctgacgagcatcacaaaaatcgacgctcaagtcagaggtggcgaaacccgacaggactataaagataccaggcgtttccccctggaagctccctcgtgcgctctcctgttccgaccctgccgcttaccggatacctgtccgcctttctcccttcgggaagcgtggcgctttctcatagctcacgctgtaggtatctcagttcggtgtaggtcgttcgctccaagctgggctgtgtgcacgaaccccccgttcagcccgaccgctgcgccttatccggtaactatcgtcttgagtccaacccggtaagacacgacttatcgccactggcagcagccactggtaacaggattagcagagcgaggtatgtaggcggtgctacagagttcttgaagtggtggcctaactacggctacactagaaggacagtatttggtatctgcgctctgctgaagccagttaccttcggaaaaagagttggtagctcttgatccggcaaacaaaccaccgctggtagcggtggtttttttgtttgcaagcagcagattacgcgcagaaaaaaaggatctcaagaagatcctttgatcttttctacggggtctgacgctcagtggaacgaaaactcacgttaagggattttggtcatgagattatcaaaaaggatcttcacctagatccttttaaattaaaaatgaagttttaaatcaatctaaagtatatatgagtaaacttggtctgacagttaccaatgcttaatcagtgaggcacctatctcagcgatctgtctatttcgttcatccatagttgcctgactccccgtcgtgtagataactacgatacgggagcgcttaccatctggccccagtgctgcaatgataccgcgagacccacgctcaccggctccagatttatcagcaataaaccagccagccggaagggccgagcgcagaagtggtcctgcaactttatccgcctccattcagtctattaattgttgccgggaagctagagtaagtagttcgccagttaatagtttgcgcaacgttgttggcattgctacaggcatcgtggtgtcactctcgtcgtttggtatggcttcattcagctccggttcccaacgatcaaggcgagttacatgatcccccatgttgtgcaaaaaagcggttagctccttcggtcctccgatcgttgtcagaagtaagttggccgcagtgttatcactcatggttatggcagcactgcataattctcttactgtcatgccatccgtaagatgcttttctgtgactggtgagtactcaaccaagtcattctgagaatagtgtatgcggcgaccgagttgctcttgcccggcgtcaatacgggataatagtgtatcacatagcagaactttaaaagtgctcatcattggaaaacgttcttcggggcgaaaactctcaaggatcttaccgctgttgagatccagttcgatgtaacccactcgtgcacccaactgatcttcagcatcttttactttcaccagcgtttctgggtgagcaaaaacaggaaggcaaaatgccgcaaaaaagggaataagggcgacacggaaatgttgaatactcatactcttcctttttcaatgggtaataactgatataattaaattgaagctctaatttgtgagtttagtatacatgcatttacttataatacagttttttagttttgctggccgcatcttctcaaatatgcttcccagcctgcttttctgtaacgttcaccctctaccttagcatcccttccctttgcaaatagtcctcttccaacaataataatgtcagatcctgtagagaccacatcatccacggttctatactgttgacccaatgcgtctcccttgtcatctaaacccacaccgggtgtcataatcaaccaatcgtaaccttcatctcttccacccatgtctctttgagcaataaagccgataacaaaatctttgtcgctcttcgcaatgtcaacagtacccttagtatattctccagtagatagggagcccttgcatgacaattctgctaacatcaaaaggcctctaggttcctttgttacttcttctgccgcctgcttcaaaccgctaacaatacctgggcccaccacaccgtgtgcattcgtaatgtctgcccattctgctattctgtatacacccgcagagtactgcaatttgactgtattaccaatgtcagcaaattttctgtcttcg

SEQ ID NO: 378 - DNA, 7138 bp, Artificial Sequence
  PLAS477
aagagtaaaaaattgtacttggcggataatgcctttagcggcttaactgtgccctccatggaaaaatcagtcaagatatccacatgtgtttttagtaaacaaattttgggacctaatgcttcaactaactccagtaattccttggtggtacgaacatccaatgaagcacacaagtttgtttgcttttcgtgcatgatattaaatagcttggcagcaacaggactaggatgagtagcagcacgttccttatatgtagctttcgacatgatttatcttcgtttcctgcaggtttttgttctgtgcagttgggttaagaatactgggcaatttcatgtttcttcaacactacatatgcgtatatataccaatctaagtctgtgctccttccttcgttcttccttctgttcggagattaccgaatcaaaaaaatttcaaagaaaccgaaatcaaaaaaaagaataaaaaaaaaatgatgaattgaattgaaaagctagcttatcgatgataagctgtcaaagatgagaattaattccacggactatagactatactagatactccgtctactgtacgatacacttccgctcaggtccttgtcctttaacgaggccttaccactcttttgttactctattgatccagctcagcaaaggcagtgtgatctaagattctatcttcgcgatgtagtaaaactagctagaccgagaaagagactagaaatgcaaaaggcacttctacaatggctgccatcattattatccgatgtgacgctgcagcttctcaatgatattcgaatacgctttgaggagatacagcctaatatccgacaaactgttttacagatttacgatcgtacttgttacccatcattgaattttgaacatccgaacctgggagttttccctgaaacagatagtatatttgaacctgtataataatatatagtctagcgctttacggaagacaatgtatgtatttcggttcctggagaaactattgcatctattgcataggtaatcttgcacgtcgcatccccggttcattttctgcgtttccatcttgcacttcaatagcatatctttgttaacgaagcatctgtgcttcattttgtagaacaaaaatgcaacgcgagagcgctaatttttcaaacaaagaatctgagctgcatttttacagaacagaaatgcaacgcgaaagcgctattttaccaacgaagaatctgtgcttcatttttgtaaaacaaaaatgcaacgcgacgagagcgctaatttttcaaacaaagaatctgagctgcatttttacagaacagaaatgcaacgcgagagcgctattttaccaacaaagaatctatacttcttttttgttctacaaaaatgcatcccgagagcgctatttttctaacaaagcatcttagattactttttttctcctttgtgcgctctataatgcagtctcttgataactttttgcactgtaggtccgttaaggttagaagaaggctactttggtgtctattttctcttccataaaaaaagcctgactccacttcccgcgtttactgattactagcgaagctgcgggtgcattttttcaagataaaggcatccccgattatattctataccgatgtggattgcgcatactttgtgaacagaaagtgatagcgttgatgattcttcattggtcagaaaattatgaacggtttcttctattttgtctctatatactacgtataggaaatgtttacattttcgtattgttttcgattcactctatgaatagttcttactacaatttttttgtctaaagagtaatactagagataaacataaaaaatgtagaggtcgagtttagatgcaagttcaaggagcgaaaggtggatgggtaggttatatagggatatagcacagagatatatagcaaagagatacttttgagcaatgtttgtggaagcggtattcgcaatgggaagctccaccccggttgataatcagaaaagccccaaaaacaggaagattgtataagcaaatatttaaattgtaaacgttaatattttgttaaaattcgcgttaaatttttgttaaatcagctcattttttaacgaatagcccgaaatcggcaaaatcccttataaatcaaaagaatagaccgagatagggttgagtgttgttccagtttccaacaagagtccactattaaagaacgtggactccaacgtcaaagggcgaaaaagggtctatcagggcgatggcccactacgtgaaccatcaccctaatcaagttttttggggtcgaggtgccgtaaagcagtaaatcggaagggtaaacggatgcccccatttagagcttgacggggaaagccggcgaacgtggcgagaaaggaagggaagaaagcgaaaggagcgggggctagggcggtgggaagtgtaggggtcacgctgggcgtaaccaccacacccgccgcgcttaatggggcgctacagggcgcgtggggatgatccactagtacggattagaagccgccgagcgggtgacagccctccgaaggaagactctcctccgtgcgtcctcgtcttcaccggtcgcgttcctgaaacgcagatgtgcctcgcgccgcactgctccgaacaataaagattctacaatactagcttttatggttatgaagaggaaaaattggcagtaacctggccccacaaaccttcaaatgaacgaatcaaattaacaaccataggatgataatgcgattagttttttagccttatttctggggtaattaatcagcgaagcgatgatttttgatctattaacagatatataaatgcaaaaactgcataaccactttaactaatactttcaacattttcggtttgtattacttcttattcaaatgtaataaaagtatcaacaaaaaattgttaatatacctctatactttaacgtcaaggagaaaaaaccccggatcggactactagcagctgtaatacgactcactatagggaatattaagcttaaacaatgagtgtgttaggagggtatgagtctgacccatcatatcaacatggcgttaaaaagtgcgagttgttggcatctacttgtttcacatattttggtcctaagggtcaagccttcaacaccatgcaagttgatgaatcgtggtgggatactgcattcgtggtgattacaccttctatggcttccgttgatgagattcgtaatgctcaaagggcacaaggtcctgcaactgtcttagctattggtaccgccacccctgacaattgtctgtaccaatctgactttgctgattattattttagagtgacgaagtcggaacatatgacagagttaaagaaaaaatttaatagaatttgtgacaaaagtatgattaaaaagcgttatatccatcttactgaagaaattttggaagaacatcctaatattggtgcgtacatggctccatcattaaacatcagacaagagattataacggcagaggttcctaaattgggtaaggaagcagcattgaaggccctgaaagagtggggtcaaccaaaatcgaagataactcacctggtattctgtactacgtcaggtgttgagatgccaggcgccgactacaaattagctaatctattgggtttagaaccatctgtcaggagagttatgctataccatcaaggttgttacgctggcggtactgtgttgagaacagctaaagacctggccgaaaataacgctgaagctagagttctagtggtctgttcagaaataaccgtggtgacttttagagggccatccgaatctgctttggattctctagtcggtcaagccctattcggcgatgggtctgctgccatgatcattggttcagaccctgacatttctatcgaaagacctctatttcaacttgtctcggccactcagacttttattccaaacacacaaggtgcgatagctggtaacctaagagaggtaggcctgacgttccatctatggccaaatgtgccaacgctgatatctgagaatatagaaaagtgcttaacgcaagcttttgatcctttaggtattagcgattggaattctttgttctggattgctcaccctggtggtcccgctatactagacgctgtggaggctaaattgtcattagataaacagaaactaaatgccacacgtcacatattatcagaatacggtaatatgtcctcagcttgtgtgttgtttatcttagacgaaatgagaaagaaatctttaaaggaaggtaaaactacaacaggcgaaggtttggattggggcgttctattcggcttcggtccaggtttgactatcgaaacagttgttttgcattccatttgtatggatagtaactaactcgagcatgcatctagagggccgcatcatgtaattagttatgtcacgcttacattcacgccctccccccacatccgctctaaccgaaaaggaaggagttagacaacctgaagtctaggtccctatttatttttttatagttatgttagtattaagaacgttatttatatttcaaatttttcttttttttctgtacagacgcgtgtacgcatgtaacattatactgaaaaccttgcttgagaaggttttgggacgctcgaaggctttaatttgcggccctgcattaatgaatcggccaacgcgcggggagaggcggtttgcgtattgggcgctcttccgcttcctcgctcactgactcgctgcgctcggtcgttcggctgcggcgagcggtatcagctcactcaaaggcggtaatacggttatccacagaatcaggggataacgcaggaaagaacatgtgagcaaaaggccagcaaaagcccaggaaccgtaaaaaggccgcgttgctggcgtttttccataggctccgcccccctgacgagcatcacaaaaatcgacgctcaagtcagaggtggcgaaacccgacaggactataaagataccaggcgtttccccctggaagctccctcgtgcgctctcctgttccgaccctgccgcttaccggatacctgtccgcctttctcccttcgggaagcgtggcgctttctcatagctcacgctgtaggtatctcagttcggtgtaggtcgttcgctccaagctgggctgtgtgcacgaaccccccgttcagcccgaccgctgcgccttatccggtaactatcgtcttgagtccaacccggtaagacacgacttatcgccactggcagcagccactggtaacaggattagcagagcgaggtatgtaggcggtgctacagagttcttgaagtggtggcctaactacggctacactagaaggacagtatttggtatctgcgctctgctgaagccagttaccttcggaaaaagagttggtagctcttgatccggcaaacaaaccaccgctggtagcggtggtttttttgtttgcaagcagcagattacgcgcagaaaaaaaggatctcaagaagatcctttgatcttttctacggggtctgacgctcagtggaacgaaaactcacgttaagggattttggtcatgagattatcaaaaaggatcttcacctagatccttttaaattaaaaatgaagttttaaatcaatctaaagtatatatgagtaaacttggtctgacagttaccaatgcttaatcagtgaggcacctatctcagcgatctgtctatttcgttcatccatagttgcctgactccccgtcgtgtagataactacgatacgggagcgcttaccatctggccccagtgctgcaatgataccgcgagacccacgctcaccggctccagatttatcagcaataaaccagccagccggaagggccgagcgcagaagtggtcctgcaactttatccgcctccattcagtctattaattgttgccgggaagctagagtaagtagttcgccagttaatagtttgcgcaacgttgttggcattgctacaggcatcgtggtgtcactctcgtcgtttggtatggcttcattcagctccggttcccaacgatcaaggcgagttacatgatcccccatgttgtgcaaaaaagcggttagctccttcggtcctccgatcgttgtcagaagtaagttggccgcagtgttatcactcatggttatggcagcactgcataattctcttactgtcatgccatccgtaagatgcttttctgtgactggtgagtactcaaccaagtcattctgagaatagtgtatgcggcgaccgagttgctcttgcccggcgtcaatacgggataatagtgtatcacatagcagaactttaaaagtgctcatcattggaaaacgttcttcggggcgaaaactctcaaggatcttaccgctgttgagatccagttcgatgtaacccactcgtgcacccaactgatcttcagcatcttttactttcaccagcgtttctgggtgagcaaaaacaggaaggcaaaatgccgcaaaaaagggaataagggcgacacggaaatgttgaatactcatactcttcctttttcaatgggtaataactgatataattaaattgaagctctaatttgtgagtttagtatacatgcatttacttataatacagttttttagttttgctggccgcatcttctcaaatatgcttcccagcctgcttttctgtaacgttcaccctctaccttagcatcccttccctttgcaaatagtcctcttccaacaataataatgtcagatcctgtagagaccacatcatccacggttctatactgttgacccaatgcgtctcccttgtcatctaaacccacaccgggtgtcataatcaaccaatcgtaaccttcatctcttccacccatgtctctttgagcaataaagccgataacaaaatctttgtcgctcttcgcaatgtcaacagtacccttagtatattctccagtagatagggagcccttgcatgacaattctgctaacatcaaaaggcctctaggttcctttgttacttcttctgccgcctgcttcaaaccgctaacaatacctgggcccaccacaccgtgtgcattcgtaatgtctgcccattctgctattctgtatacacccgcagagtactgcaatttgactgtattaccaatgtcagcaaattttctgtcttcg

SEQ ID NO: 379 - DNA, 6856 bp, Artificial Sequence
  PLAS478
aagagtaaaaaattgtacttggcggataatgcctttagcggcttaactgtgccctccatggaaaaatcagtcaagatatccacatgtgtttttagtaaacaaattttgggacctaatgcttcaactaactccagtaattccttggtggtacgaacatccaatgaagcacacaagtttgtttgcttttcgtgcatgatattaaatagcttggcagcaacaggactaggatgagtagcagcacgttccttatatgtagctttcgacatgatttatcttcgtttcctgcaggtttttgttctgtgcagttgggttaagaatactgggcaatttcatgtttcttcaacactacatatgcgtatatataccaatctaagtctgtgctccttccttcgttcttccttctgttcggagattaccgaatcaaaaaaatttcaaagaaaccgaaatcaaaaaaaagaataaaaaaaaaatgatgaattgaattgaaaagctagcttatcgatgataagctgtcaaagatgagaattaattccacggactatagactatactagatactccgtctactgtacgatacacttccgctcaggtccttgtcctttaacgaggccttaccactcttttgttactctattgatccagctcagcaaaggcagtgtgatctaagattctatcttcgcgatgtagtaaaactagctagaccgagaaagagactagaaatgcaaaaggcacttctacaatggctgccatcattattatccgatgtgacgctgcagcttctcaatgatattcgaatacgctttgaggagatacagcctaatatccgacaaactgttttacagatttacgatcgtacttgttacccatcattgaattttgaacatccgaacctgggagttttccctgaaacagatagtatatttgaacctgtataataatatatagtctagcgctttacggaagacaatgtatgtatttcggttcctggagaaactattgcatctattgcataggtaatcttgcacgtcgcatccccggttcattttctgcgtttccatcttgcacttcaatagcatatctttgttaacgaagcatctgtgcttcattttgtagaacaaaaatgcaacgcgagagcgctaatttttcaaacaaagaatctgagctgcatttttacagaacagaaatgcaacgcgaaagcgctattttaccaacgaagaatctgtgcttcatttttgtaaaacaaaaatgcaacgcgacgagagcgctaatttttcaaacaaagaatctgagctgcatttttacagaacagaaatgcaacgcgagagcgctattttaccaacaaagaatctatacttcttttttgttctacaaaaatgcatcccgagagcgctatttttctaacaaagcatcttagattactttttttctcctttgtgcgctctataatgcagtctcttgataactttttgcactgtaggtccgttaaggttagaagaaggctactttggtgtctattttctcttccataaaaaaagcctgactccacttcccgcgtttactgattactagcgaagctgcgggtgcattttttcaagataaaggcatccccgattatattctataccgatgtggattgcgcatactttgtgaacagaaagtgatagcgttgatgattcttcattggtcagaaaattatgaacggtttcttctattttgtctctatatactacgtataggaaatgtttacattttcgtattgttttcgattcactctatgaatagttcttactacaatttttttgtctaaagagtaatactagagataaacataaaaaatgtagaggtcgagtttagatgcaagttcaaggagcgaaaggtggatgggtaggttatatagggatatagcacagagatatatagcaaagagatacttttgagcaatgtttgtggaagcggtattcgcaatgggaagctccaccccggttgataatcagaaaagccccaaaaacaggaagattgtataagcaaatatttaaattgtaaacgttaatattttgttaaaattcgcgttaaatttttgttaaatcagctcattttttaacgaatagcccgaaatcggcaaaatcccttataaatcaaaagaatagaccgagatagggttgagtgttgttccagtttccaacaagagtccactattaaagaacgtggactccaacgtcaaagggcgaaaaagggtctatcagggcgatggcccactacgtgaaccatcaccctaatcaagttttttggggtcgaggtgccgtaaagcagtaaatcggaagggtaaacggatgcccccatttagagcttgacggggaaagccggcgaacgtggcgagaaaggaagggaagaaagcgaaaggagcgggggctagggcggtgggaagtgtaggggtcacgctgggcgtaaccaccacacccgccgcgcttaatggggcgctacagggcgcgtggggatgatccactagtacggattagaagccgccgagcgggtgacagccctccgaaggaagactctcctccgtgcgtcctcgtcttcaccggtcgcgttcctgaaacgcagatgtgcctcgcgccgcactgctccgaacaataaagattctacaatactagcttttatggttatgaagaggaaaaattggcagtaacctggccccacaaaccttcaaatgaacgaatcaaattaacaaccataggatgataatgcgattagttttttagccttatttctggggtaattaatcagcgaagcgatgatttttgatctattaacagatatataaatgcaaaaactgcataaccactttaactaatactttcaacattttcggtttgtattacttcttattcaaatgtaataaaagtatcaacaaaaaattgttaatatacctctatactttaacgtcaaggagaaaaaaccccggatcggactactagcagctgtaatacgactcactatagggaatattaagcttaaacaatggcgagtgtagaagagatcagaaacgctcaaagagctaaaggtccagctacagtactagcgattggcaccgctacccctgataattgtctatatcaatctgacttcgcagattattattttagggtaacaaaatctgagcacatgactgaattaaagaaaaaatttaacagaatctccttgcatcatttgacagaagaaatgctggaagaacacccaaacatcggtgcctatatggccccatccttgaatattagacaagaaataatcacggctgaagtgccaaagttgggtaaagaggctgctttgaaggccctgaaggaatggggccaacctaaaagcaagattacacatttggttttttgcacgacctctggtgtagaaatgttagtagagactgttcttagaactgctaaagatttggctgaaaataatgcaggggccagagtgctggtagtctgtagtgagatcactgtcgttacattcagaggtccaagtgagacggctctggactctttagtaggacaagccctttttggggatggttctgcagcagtgataatagggtcagatcctgacatatcgattgaaagaccacttttccagttagtcagcgcggcacaaactttcattccaaatagtgctggtgccattgctggaaacttgcgtgaagtgggtttaacttttcagttatggcctaatgtaccttctttgatatctgaaaatattgagaagtgccttaccaaagccttcgatcctattggaatcagtgattggaactccctattttggatagcacaccctgggggccccgcgattctagatgctgttgaagctaaattgagtcttgataaacaaaagctaaaagcaactagacacattttgagtgagtacggaaatatgtcatccgcatgtgttttgttcatcttagatgagatgagaaaaaaatccttaaaggaaggtaaaaccaccacaggcgagggtctggattggggtgtgttgtttggtttcggacctggtttgactattgaaaccgtcgtattacactcagtccaaatggattccaactagctcgagcatgcatctagagggccgcatcatgtaattagttatgtcacgcttacattcacgccctccccccacatccgctctaaccgaaaaggaaggagttagacaacctgaagtctaggtccctatttatttttttatagttatgttagtattaagaacgttatttatatttcaaatttttcttttttttctgtacagacgcgtgtacgcatgtaacattatactgaaaaccttgcttgagaaggttttgggacgctcgaaggctttaatttgcggccctgcattaatgaatcggccaacgcgcggggagaggcggtttgcgtattgggcgctcttccgcttcctcgctcactgactcgctgcgctcggtcgttcggctgcggcgagcggtatcagctcactcaaaggcggtaatacggttatccacagaatcaggggataacgcaggaaagaacatgtgagcaaaaggccagcaaaagcccaggaaccgtaaaaaggccgcgttgctggcgtttttccataggctccgcccccctgacgagcatcacaaaaatcgacgctcaagtcagaggtggcgaaacccgacaggactataaagataccaggcgtttccccctggaagctccctcgtgcgctctcctgttccgaccctgccgcttaccggatacctgtccgcctttctcccttcgggaagcgtggcgctttctcatagctcacgctgtaggtatctcagttcggtgtaggtcgttcgctccaagctgggctgtgtgcacgaaccccccgttcagcccgaccgctgcgccttatccggtaactatcgtcttgagtccaacccggtaagacacgacttatcgccactggcagcagccactggtaacaggattagcagagcgaggtatgtaggcggtgctacagagttcttgaagtggtggcctaactacggctacactagaaggacagtatttggtatctgcgctctgctgaagccagttaccttcggaaaaagagttggtagctcttgatccggcaaacaaaccaccgctggtagcggtggtttttttgtttgcaagcagcagattacgcgcagaaaaaaaggatctcaagaagatcctttgatcttttctacggggtctgacgctcagtggaacgaaaactcacgttaagggattttggtcatgagattatcaaaaaggatcttcacctagatccttttaaattaaaaatgaagttttaaatcaatctaaagtatatatgagtaaacttggtctgacagttaccaatgcttaatcagtgaggcacctatctcagcgatctgtctatttcgttcatccatagttgcctgactccccgtcgtgtagataactacgatacgggagcgcttaccatctggccccagtgctgcaatgataccgcgagacccacgctcaccggctccagatttatcagcaataaaccagccagccggaagggccgagcgcagaagtggtcctgcaactttatccgcctccattcagtctattaattgttgccgggaagctagagtaagtagttcgccagttaatagtttgcgcaacgttgttggcattgctacaggcatcgtggtgtcactctcgtcgtttggtatggcttcattcagctccggttcccaacgatcaaggcgagttacatgatcccccatgttgtgcaaaaaagcggttagctccttcggtcctccgatcgttgtcagaagtaagttggccgcagtgttatcactcatggttatggcagcactgcataattctcttactgtcatgccatccgtaagatgcttttctgtgactggtgagtactcaaccaagtcattctgagaatagtgtatgcggcgaccgagttgctcttgcccggcgtcaatacgggataatagtgtatcacatagcagaactttaaaagtgctcatcattggaaaacgttcttcggggcgaaaactctcaaggatcttaccgctgttgagatccagttcgatgtaacccactcgtgcacccaactgatcttcagcatcttttactttcaccagcgtttctgggtgagcaaaaacaggaaggcaaaatgccgcaaaaaagggaataagggcgacacggaaatgttgaatactcatactcttcctttttcaatgggtaataactgatataattaaattgaagctctaatttgtgagtttagtatacatgcatttacttataatacagttttttagttttgctggccgcatcttctcaaatatgcttcccagcctgcttttctgtaacgttcaccctctaccttagcatcccttccctttgcaaatagtcctcttccaacaataataatgtcagatcctgtagagaccacatcatccacggttctatactgttgacccaatgcgtctcccttgtcatctaaacccacaccgggtgtcataatcaaccaatcgtaaccttcatctcttccacccatgtctctttgagcaataaagccgataacaaaatctttgtcgctcttcgcaatgtcaacagtacccttagtatattctccagtagatagggagcccttgcatgacaattctgctaacatcaaaaggcctctaggttcctttgttacttcttctgccgcctgcttcaaaccgctaacaatacctgggcccaccacaccgtgtgcattcgtaatgtctgcccattctgctattctgtatacacccgcagagtactgcaatttgactgtattaccaatgtcagcaaattttctgtcttcg

SEQ ID NO: 380 - DNA, 6889 bp, Artificial Sequence
  PLAS479
aagagtaaaaaattgtacttggcggataatgcctttagcggcttaactgtgccctccatggaaaaatcagtcaagatatccacatgtgtttttagtaaacaaattttgggacctaatgcttcaactaactccagtaattccttggtggtacgaacatccaatgaagcacacaagtttgtttgcttttcgtgcatgatattaaatagcttggcagcaacaggactaggatgagtagcagcacgttccttatatgtagctttcgacatgatttatcttcgtttcctgcaggtttttgttctgtgcagttgggttaagaatactgggcaatttcatgtttcttcaacactacatatgcgtatatataccaatctaagtctgtgctccttccttcgttcttccttctgttcggagattaccgaatcaaaaaaatttcaaagaaaccgaaatcaaaaaaaagaataaaaaaaaaatgatgaattgaattgaaaagctagcttatcgatgataagctgtcaaagatgagaattaattccacggactatagactatactagatactccgtctactgtacgatacacttccgctcaggtccttgtcctttaacgaggccttaccactcttttgttactctattgatccagctcagcaaaggcagtgtgatctaagattctatcttcgcgatgtagtaaaactagctagaccgagaaagagactagaaatgcaaaaggcacttctacaatggctgccatcattattatccgatgtgacgctgcagcttctcaatgatattcgaatacgctttgaggagatacagcctaatatccgacaaactgttttacagatttacgatcgtacttgttacccatcattgaattttgaacatccgaacctgggagttttccctgaaacagatagtatatttgaacctgtataataatatatagtctagcgctttacggaagacaatgtatgtatttcggttcctggagaaactattgcatctattgcataggtaatcttgcacgtcgcatccccggttcattttctgcgtttccatcttgcacttcaatagcatatctttgttaacgaagcatctgtgcttcattttgtagaacaaaaatgcaacgcgagagcgctaatttttcaaacaaagaatctgagctgcatttttacagaacagaaatgcaacgcgaaagcgctattttaccaacgaagaatctgtgcttcatttttgtaaaacaaaaatgcaacgcgacgagagcgctaatttttcaaacaaagaatctgagctgcatttttacagaacagaaatgcaacgcgagagcgctattttaccaacaaagaatctatacttcttttttgttctacaaaaatgcatcccgagagcgctatttttctaacaaagcatcttagattactttttttctcctttgtgcgctctataatgcagtctcttgataactttttgcactgtaggtccgttaaggttagaagaaggctactttggtgtctattttctcttccataaaaaaagcctgactccacttcccgcgtttactgattactagcgaagctgcgggtgcattttttcaagataaaggcatccccgattatattctataccgatgtggattgcgcatactttgtgaacagaaagtgatagcgttgatgattcttcattggtcagaaaattatgaacggtttcttctattttgtctctatatactacgtataggaaatgtttacattttcgtattgttttcgattcactctatgaatagttcttactacaatttttttgtctaaagagtaatactagagataaacataaaaaatgtagaggtcgagtttagatgcaagttcaaggagcgaaaggtggatgggtaggttatatagggatatagcacagagatatatagcaaagagatacttttgagcaatgtttgtggaagcggtattcgcaatgggaagctccaccccggttgataatcagaaaagccccaaaaacaggaagattgtataagcaaatatttaaattgtaaacgttaatattttgttaaaattcgcgttaaatttttgttaaatcagctcattttttaacgaatagcccgaaatcggcaaaatcccttataaatcaaaagaatagaccgagatagggttgagtgttgttccagtttccaacaagagtccactattaaagaacgtggactccaacgtcaaagggcgaaaaagggtctatcagggcgatggcccactacgtgaaccatcaccctaatcaagttttttggggtcgaggtgccgtaaagcagtaaatcggaagggtaaacggatgcccccatttagagcttgacggggaaagccggcgaacgtggcgagaaaggaagggaagaaagcgaaaggagcgggggctagggcggtgggaagtgtaggggtcacgctgggcgtaaccaccacacccgccgcgcttaatggggcgctacagggcgcgtggggatgatccactagtacggattagaagccgccgagcgggtgacagccctccgaaggaagactctcctccgtgcgtcctcgtcttcaccggtcgcgttcctgaaacgcagatgtgcctcgcgccgcactgctccgaacaataaagattctacaatactagcttttatggttatgaagaggaaaaattggcagtaacctggccccacaaaccttcaaatgaacgaatcaaattaacaaccataggatgataatgcgattagttttttagccttatttctggggtaattaatcagcgaagcgatgatttttgatctattaacagatatataaatgcaaaaactgcataaccactttaactaatactttcaacattttcggtttgtattacttcttattcaaatgtaataaaagtatcaacaaaaaattgttaatatacctctatactttaacgtcaaggagaaaaaaccccggatcggactactagcagctgtaatacgactcactatagggaatattaagcttaaacaatggctagcgtagaagaaatacgtaacgcgcaaagagcaaagggccctgctacggtgttggcaataggtacggctacgcctgataactgtttatatcaatccgatttcgctgattattatttccgtgtcacgaaatcagaacacatgaccgaacttaaaaagaagttcaatcgtatttgtgacaaatcaatgatcaaaaaaagatatatccatttgacagaggaaatgctagaagaacaccccaatattggggcatatatggctccctccttaaatataagacaggaaataatcactgcagaagtcccgaaattaggaaaagaagccgctttgaaggccctgaagaattacaagctagccaacttgttgggattggagccatcagtaagaagggttatgttgtatcaccaaggatgttacgcaggtggtactgttttgagaactgccaaagacttggcagaaaataacgcaggggctagagtcttagtggtttgctccgaaatcactgtagttacctttagaggcccgagtgaagatgctttagattctttggttggccaggccttgtttggagatgggtctgcagcagttatcgttggttctgaccccgacatctcgatagaacaaccactttttcaacttgtgtctgcggcgcaaacatttatcccaaatagcgcaggtgctatcgcgggaaatcttagagaagttggtttaacctttcaattgtggcctaatgtaccgtctcttatttcagaaaacattgaaaaatgtttgacaaaagcttttgatccaataggtatctctgattggaattccctattctggatagcacatccagggggtccagctattcttgatgcagtggaagccaaactatcactggacaaacagaaactaaaggccacaagacatattctgtccgagtatggaaatatgtcgagtgcgtgtgtcttatttattttggatgaaatgagaaaaaagtcccttaaagaagggaagactaccactggagaaggtttggattggggagtcttgtttgggttcgggccaggtttgaccatcgaaacagttgttttgcatagcgttcagatggattctaactgactcgagcatgcatctagagggccgcatcatgtaattagttatgtcacgcttacattcacgccctccccccacatccgctctaaccgaaaaggaaggagttagacaacctgaagtctaggtccctatttatttttttatagttatgttagtattaagaacgttatttatatttcaaatttttcttttttttctgtacagacgcgtgtacgcatgtaacattatactgaaaaccttgcttgagaaggttttgggacgctcgaaggctttaatttgcggccctgcattaatgaatcggccaacgcgcggggagaggcggtttgcgtattgggcgctcttccgcttcctcgctcactgactcgctgcgctcggtcgttcggctgcggcgagcggtatcagctcactcaaaggcggtaatacggttatccacagaatcaggggataacgcaggaaagaacatgtgagcaaaaggccagcaaaagcccaggaaccgtaaaaaggccgcgttgctggcgtttttccataggctccgcccccctgacgagcatcacaaaaatcgacgctcaagtcagaggtggcgaaacccgacaggactataaagataccaggcgtttccccctggaagctccctcgtgcgctctcctgttccgaccctgccgcttaccggatacctgtccgcctttctcccttcgggaagcgtggcgctttctcatagctcacgctgtaggtatctcagttcggtgtaggtcgttcgctccaagctgggctgtgtgcacgaaccccccgttcagcccgaccgctgcgccttatccggtaactatcgtcttgagtccaacccggtaagacacgacttatcgccactggcagcagccactggtaacaggattagcagagcgaggtatgtaggcggtgctacagagttcttgaagtggtggcctaactacggctacactagaaggacagtatttggtatctgcgctctgctgaagccagttaccttcggaaaaagagttggtagctcttgatccggcaaacaaaccaccgctggtagcggtggtttttttgtttgcaagcagcagattacgcgcagaaaaaaaggatctcaagaagatcctttgatcttttctacggggtctgacgctcagtggaacgaaaactcacgttaagggattttggtcatgagattatcaaaaaggatcttcacctagatccttttaaattaaaaatgaagttttaaatcaatctaaagtatatatgagtaaacttggtctgacagttaccaatgcttaatcagtgaggcacctatctcagcgatctgtctatttcgttcatccatagttgcctgactccccgtcgtgtagataactacgatacgggagcgcttaccatctggccccagtgctgcaatgataccgcgagacccacgctcaccggctccagatttatcagcaataaaccagccagccggaagggccgagcgcagaagtggtcctgcaactttatccgcctccattcagtctattaattgttgccgggaagctagagtaagtagttcgccagttaatagtttgcgcaacgttgttggcattgctacaggcatcgtggtgtcactctcgtcgtttggtatggcttcattcagctccggttcccaacgatcaaggcgagttacatgatcccccatgttgtgcaaaaaagcggttagctccttcggtcctccgatcgttgtcagaagtaagttggccgcagtgttatcactcatggttatggcagcactgcataattctcttactgtcatgccatccgtaagatgcttttctgtgactggtgagtactcaaccaagtcattctgagaatagtgtatgcggcgaccgagttgctcttgcccggcgtcaatacgggataatagtgtatcacatagcagaactttaaaagtgctcatcattggaaaacgttcttcggggcgaaaactctcaaggatcttaccgctgttgagatccagttcgatgtaacccactcgtgcacccaactgatcttcagcatcttttactttcaccagcgtttctgggtgagcaaaaacaggaaggcaaaatgccgcaaaaaagggaataagggcgacacggaaatgttgaatactcatactcttcctttttcaatgggtaataactgatataattaaattgaagctctaatttgtgagtttagtatacatgcatttacttataatacagttttttagttttgctggccgcatcttctcaaatatgcttcccagcctgcttttctgtaacgttcaccctctaccttagcatcccttccctttgcaaatagtcctcttccaacaataataatgtcagatcctgtagagaccacatcatccacggttctatactgttgacccaatgcgtctcccttgtcatctaaacccacaccgggtgtcataatcaaccaatcgtaaccttcatctcttccacccatgtctctttgagcaataaagccgataacaaaatctttgtcgctcttcgcaatgtcaacagtacccttagtatattctccagtagatagggagcccttgcatgacaattctgctaacatcaaaaggcctctaggttcctttgttacttcttctgccgcctgcttcaaaccgctaacaatacctgggcccaccacaccgtgtgcattcgtaatgtctgcccattctgctattctgtatacacccgcagagtactgcaatttgactgtattaccaatgtcagcaaattttctgtcttcg

SEQ ID NO: 381 - DNA, 6964 bp, Artificial Sequence
  PLAS480
aagagtaaaaaattgtacttggcggataatgcctttagcggcttaactgtgccctccatggaaaaatcagtcaagatatccacatgtgtttttagtaaacaaattttgggacctaatgcttcaactaactccagtaattccttggtggtacgaacatccaatgaagcacacaagtttgtttgcttttcgtgcatgatattaaatagcttggcagcaacaggactaggatgagtagcagcacgttccttatatgtagctttcgacatgatttatcttcgtttcctgcaggtttttgttctgtgcagttgggttaagaatactgggcaatttcatgtttcttcaacactacatatgcgtatatataccaatctaagtctgtgctccttccttcgttcttccttctgttcggagattaccgaatcaaaaaaatttcaaagaaaccgaaatcaaaaaaaagaataaaaaaaaaatgatgaattgaattgaaaagctagcttatcgatgataagctgtcaaagatgagaattaattccacggactatagactatactagatactccgtctactgtacgatacacttccgctcaggtccttgtcctttaacgaggccttaccactcttttgttactctattgatccagctcagcaaaggcagtgtgatctaagattctatcttcgcgatgtagtaaaactagctagaccgagaaagagactagaaatgcaaaaggcacttctacaatggctgccatcattattatccgatgtgacgctgcagcttctcaatgatattcgaatacgctttgaggagatacagcctaatatccgacaaactgttttacagatttacgatcgtacttgttacccatcattgaattttgaacatccgaacctgggagttttccctgaaacagatagtatatttgaacctgtataataatatatagtctagcgctttacggaagacaatgtatgtatttcggttcctggagaaactattgcatctattgcataggtaatcttgcacgtcgcatccccggttcattttctgcgtttccatcttgcacttcaatagcatatctttgttaacgaagcatctgtgcttcattttgtagaacaaaaatgcaacgcgagagcgctaatttttcaaacaaagaatctgagctgcatttttacagaacagaaatgcaacgcgaaagcgctattttaccaacgaagaatctgtgcttcatttttgtaaaacaaaaatgcaacgcgacgagagcgctaatttttcaaacaaagaatctgagctgcatttttacagaacagaaatgcaacgcgagagcgctattttaccaacaaagaatctatacttcttttttgttctacaaaaatgcatcccgagagcgctatttttctaacaaagcatcttagattactttttttctcctttgtgcgctctataatgcagtctcttgataactttttgcactgtaggtccgttaaggttagaagaaggctactttggtgtctattttctcttccataaaaaaagcctgactccacttcccgcgtttactgattactagcgaagctgcgggtgcattttttcaagataaaggcatccccgattatattctataccgatgtggattgcgcatactttgtgaacagaaagtgatagcgttgatgattcttcattggtcagaaaattatgaacggtttcttctattttgtctctatatactacgtataggaaatgtttacattttcgtattgttttcgattcactctatgaatagttcttactacaatttttttgtctaaagagtaatactagagataaacataaaaaatgtagaggtcgagtttagatgcaagttcaaggagcgaaaggtggatgggtaggttatatagggatatagcacagagatatatagcaaagagatacttttgagcaatgtttgtggaagcggtattcgcaatgggaagctccaccccggttgataatcagaaaagccccaaaaacaggaagattgtataagcaaatatttaaattgtaaacgttaatattttgttaaaattcgcgttaaatttttgttaaatcagctcattttttaacgaatagcccgaaatcggcaaaatcccttataaatcaaaagaatagaccgagatagggttgagtgttgttccagtttccaacaagagtccactattaaagaacgtggactccaacgtcaaagggcgaaaaagggtctatcagggcgatggcccactacgtgaaccatcaccctaatcaagttttttggggtcgaggtgccgtaaagcagtaaatcggaagggtaaacggatgcccccatttagagcttgacggggaaagccggcgaacgtggcgagaaaggaagggaagaaagcgaaaggagcgggggctagggcggtgggaagtgtaggggtcacgctgggcgtaaccaccacacccgccgcgcttaatggggcgctacagggcgcgtggggatgatccactagtacggattagaagccgccgagcgggtgacagccctccgaaggaagactctcctccgtgcgtcctcgtcttcaccggtcgcgttcctgaaacgcagatgtgcctcgcgccgcactgctccgaacaataaagattctacaatactagcttttatggttatgaagaggaaaaattggcagtaacctggccccacaaaccttcaaatgaacgaatcaaattaacaaccataggatgataatgcgattagttttttagccttatttctggggtaattaatcagcgaagcgatgatttttgatctattaacagatatataaatgcaaaaactgcataaccactttaactaatactttcaacattttcggtttgtattacttcttattcaaatgtaataaaagtatcaacaaaaaattgttaatatacctctatactttaacgtcaaggagaaaaaaccccggatcggactactagcagctgtaatacgactcactatagggaatattaagcttaaacaatggcatcagttgaagaaataagaaacgcacaaagagctaagggtccggcgactatattagctattgggacagccacaccagaccactgtgtatatcaatccgattatgcagattattacttcagggtgactaaatcagaacatatgacggaattaaaaaagaaattcaataggatttgtgacaagtctatgattaagaaaagatacatccatctaacggaggaaatgttggaagaacatcctaacatcggcgcttacatggccccttccttaaatattagacaagagataatcactgcagaggtgcctaaattgggtaaggaggcagcactaaaggcactaaaagaatggggtcaacctaagagtaaaattacacatctggtgttttgtactacgagcggtgttgaaatgccaggtgcggattacaaattggcgaaccttctaggtttggaaacatccgtcagacgtgttatgttgtatcaccagggatgttacgcgggagggactgttttaagaacagctaaagacctggccgagaataacgtgggtgccagagttctagtggtgtgtagcgaaatcactgtggttacgttccgtggtccttccgaagatgcattggattctctagtcgggcaagcacttttcggcgatggcagtgctgctgtaatagtaggatcagatcctgatatctccatagaaaggcctctatttcaattggtgtcagcggctcagactttcatcccaaattctgcgggagctattgccgggaatctacacgaagtcggtctgacgttccacctgtggcctaatgtaccgactttgatatcggaaaatatagaaaattgtttaacaaaggcttttgatcccattggaatttctgattggaattccttgttttggattgcacatccaggtggaccagctattcttgatgctgtagaagcaaaggttggtctagacaagagaaagttgaaagctacaaggcatattttatctgagtacggaaacatgtcttctgcttgtgtgttatttatactggatgaaatgaggaaaaaaagtcttaaagaaggtaaaactacaactggtgaaggattggattggggggtactgtttggtttcggtccaggcttgactatcgagacggttgtattgcattcagttcagatggacagtaactagctcgagcatgcatctagagggccgcatcatgtaattagttatgtcacgcttacattcacgccctccccccacatccgctctaaccgaaaaggaaggagttagacaacctgaagtctaggtccctatttatttttttatagttatgttagtattaagaacgttatttatatttcaaatttttcttttttttctgtacagacgcgtgtacgcatgtaacattatactgaaaaccttgcttgagaaggttttgggacgctcgaaggctttaatttgcggccctgcattaatgaatcggccaacgcgcggggagaggcggtttgcgtattgggcgctcttccgcttcctcgctcactgactcgctgcgctcggtcgttcggctgcggcgagcggtatcagctcactcaaaggcggtaatacggttatccacagaatcaggggataacgcaggaaagaacatgtgagcaaaaggccagcaaaagcccaggaaccgtaaaaaggccgcgttgctggcgtttttccataggctccgcccccctgacgagcatcacaaaaatcgacgctcaagtcagaggtggcgaaacccgacaggactataaagataccaggcgtttccccctggaagctccctcgtgcgctctcctgttccgaccctgccgcttaccggatacctgtccgcctttctcccttcgggaagcgtggcgctttctcatagctcacgctgtaggtatctcagttcggtgtaggtcgttcgctccaagctgggctgtgtgcacgaaccccccgttcagcccgaccgctgcgccttatccggtaactatcgtcttgagtccaacccggtaagacacgacttatcgccactggcagcagccactggtaacaggattagcagagcgaggtatgtaggcggtgctacagagttcttgaagtggtggcctaactacggctacactagaaggacagtatttggtatctgcgctctgctgaagccagttaccttcggaaaaagagttggtagctcttgatccggcaaacaaaccaccgctggtagcggtggtttttttgtttgcaagcagcagattacgcgcagaaaaaaaggatctcaagaagatcctttgatcttttctacggggtctgacgctcagtggaacgaaaactcacgttaagggattttggtcatgagattatcaaaaaggatcttcacctagatccttttaaattaaaaatgaagttttaaatcaatctaaagtatatatgagtaaacttggtctgacagttaccaatgcttaatcagtgaggcacctatctcagcgatctgtctatttcgttcatccatagttgcctgactccccgtcgtgtagataactacgatacgggagcgcttaccatctggccccagtgctgcaatgataccgcgagacccacgctcaccggctccagatttatcagcaataaaccagccagccggaagggccgagcgcagaagtggtcctgcaactttatccgcctccattcagtctattaattgttgccgggaagctagagtaagtagttcgccagttaatagtttgcgcaacgttgttggcattgctacaggcatcgtggtgtcactctcgtcgtttggtatggcttcattcagctccggttcccaacgatcaaggcgagttacatgatcccccatgttgtgcaaaaaagcggttagctccttcggtcctccgatcgttgtcagaagtaagttggccgcagtgttatcactcatggttatggcagcactgcataattctcttactgtcatgccatccgtaagatgcttttctgtgactggtgagtactcaaccaagtcattctgagaatagtgtatgcggcgaccgagttgctcttgcccggcgtcaatacgggataatagtgtatcacatagcagaactttaaaagtgctcatcattggaaaacgttcttcggggcgaaaactctcaaggatcttaccgctgttgagatccagttcgatgtaacccactcgtgcacccaactgatcttcagcatcttttactttcaccagcgtttctgggtgagcaaaaacaggaaggcaaaatgccgcaaaaaagggaataagggcgacacggaaatgttgaatactcatactcttcctttttcaatgggtaataactgatataattaaattgaagctctaatttgtgagtttagtatacatgcatttacttataatacagttttttagttttgctggccgcatcttctcaaatatgcttcccagcctgcttttctgtaacgttcaccctctaccttagcatcccttccctttgcaaatagtcctcttccaacaataataatgtcagatcctgtagagaccacatcatccacggttctatactgttgacccaatgcgtctcccttgtcatctaaacccacaccgggtgtcataatcaaccaatcgtaaccttcatctcttccacccatgtctctttgagcaataaagccgataacaaaatctttgtcgctcttcgcaatgtcaacagtacccttagtatattctccagtagatagggagcccttgcatgacaattctgctaacatcaaaaggcctctaggttcctttgttacttcttctgccgcctgcttcaaaccgctaacaatacctgggcccaccacaccgtgtgcattcgtaatgtctgcccattctgctattctgtatacacccgcagagtactgcaatttgactgtattaccaatgtcagcaaattttctgtcttcg

SEQ ID NO: 382 - DNA, 6823 bp, Artificial Sequence
  PLAS481
aagagtaaaaaattgtacttggcggataatgcctttagcggcttaactgtgccctccatggaaaaatcagtcaagatatccacatgtgtttttagtaaacaaattttgggacctaatgcttcaactaactccagtaattccttggtggtacgaacatccaatgaagcacacaagtttgtttgcttttcgtgcatgatattaaatagcttggcagcaacaggactaggatgagtagcagcacgttccttatatgtagctttcgacatgatttatcttcgtttcctgcaggtttttgttctgtgcagttgggttaagaatactgggcaatttcatgtttcttcaacactacatatgcgtatatataccaatctaagtctgtgctccttccttcgttcttccttctgttcggagattaccgaatcaaaaaaatttcaaagaaaccgaaatcaaaaaaaagaataaaaaaaaaatgatgaattgaattgaaaagctagcttatcgatgataagctgtcaaagatgagaattaattccacggactatagactatactagatactccgtctactgtacgatacacttccgctcaggtccttgtcctttaacgaggccttaccactcttttgttactctattgatccagctcagcaaaggcagtgtgatctaagattctatcttcgcgatgtagtaaaactagctagaccgagaaagagactagaaatgcaaaaggcacttctacaatggctgccatcattattatccgatgtgacgctgcagcttctcaatgatattcgaatacgctttgaggagatacagcctaatatccgacaaactgttttacagatttacgatcgtacttgttacccatcattgaattttgaacatccgaacctgggagttttccctgaaacagatagtatatttgaacctgtataataatatatagtctagcgctttacggaagacaatgtatgtatttcggttcctggagaaactattgcatctattgcataggtaatcttgcacgtcgcatccccggttcattttctgcgtttccatcttgcacttcaatagcatatctttgttaacgaagcatctgtgcttcattttgtagaacaaaaatgcaacgcgagagcgctaatttttcaaacaaagaatctgagctgcatttttacagaacagaaatgcaacgcgaaagcgctattttaccaacgaagaatctgtgcttcatttttgtaaaacaaaaatgcaacgcgacgagagcgctaatttttcaaacaaagaatctgagctgcatttttacagaacagaaatgcaacgcgagagcgctattttaccaacaaagaatctatacttcttttttgttctacaaaaatgcatcccgagagcgctatttttctaacaaagcatcttagattactttttttctcctttgtgcgctctataatgcagtctcttgataactttttgcactgtaggtccgttaaggttagaagaaggctactttggtgtctattttctcttccataaaaaaagcctgactccacttcccgcgtttactgattactagcgaagctgcgggtgcattttttcaagataaaggcatccccgattatattctataccgatgtggattgcgcatactttgtgaacagaaagtgatagcgttgatgattcttcattggtcagaaaattatgaacggtttcttctattttgtctctatatactacgtataggaaatgtttacattttcgtattgttttcgattcactctatgaatagttcttactacaatttttttgtctaaagagtaatactagagataaacataaaaaatgtagaggtcgagtttagatgcaagttcaaggagcgaaaggtggatgggtaggttatatagggatatagcacagagatatatagcaaagagatacttttgagcaatgtttgtggaagcggtattcgcaatgggaagctccaccccggttgataatcagaaaagccccaaaaacaggaagattgtataagcaaatatttaaattgtaaacgttaatattttgttaaaattcgcgttaaatttttgttaaatcagctcattttttaacgaatagcccgaaatcggcaaaatcccttataaatcaaaagaatagaccgagatagggttgagtgttgttccagtttccaacaagagtccactattaaagaacgtggactccaacgtcaaagggcgaaaaagggtctatcagggcgatggcccactacgtgaaccatcaccctaatcaagttttttggggtcgaggtgccgtaaagcagtaaatcggaagggtaaacggatgcccccatttagagcttgacggggaaagccggcgaacgtggcgagaaaggaagggaagaaagcgaaaggagcgggggctagggcggtgggaagtgtaggggtcacgctgggcgtaaccaccacacccgccgcgcttaatggggcgctacagggcgcgtggggatgatccactagtacggattagaagccgccgagcgggtgacagccctccgaaggaagactctcctccgtgcgtcctcgtcttcaccggtcgcgttcctgaaacgcagatgtgcctcgcgccgcactgctccgaacaataaagattctacaatactagcttttatggttatgaagaggaaaaattggcagtaacctggccccacaaaccttcaaatgaacgaatcaaattaacaaccataggatgataatgcgattagttttttagccttatttctggggtaattaatcagcgaagcgatgatttttgatctattaacagatatataaatgcaaaaactgcataaccactttaactaatactttcaacattttcggtttgtattacttcttattcaaatgtaataaaagtatcaacaaaaaattgttaatatacctctatactttaacgtcaaggagaaaaaaccccggatcggactactagcagctgtaatacgactcactatagggaatattaagcttaaacaatgtccactgaattgaaaaagaagtttaatagaatttgcgataaaagcatgatcaaaaagagatatatccacttaaccgaagaaatgttagaagaacaccccaatatcggtgcatacatggcaccaagtctaaatatccgtcaagaaatcatcactgcggaagttccgaaattaggtaaagaagctgcacttaaagccttgaaagagtggggtcaaccaaaaagtaagataacccacttggtgttctgcacaacctctggggttgaaatgccaggcgctgattataaacttgctaatttgttaggactggagcccagtgtaagaagagtaatgttatatcatcagggctgctacgcagggggtaccgttttaagaactgctaaagatcttgccgagaataatgctggcgctagggttttggtggtctgtagtgagatcacagttgttacctttagagggccatccgaggatgctttagactccttagtcggtcaagcgttatttggggatggctcggccgccgtcattatcggctcagatcctgacataagtattgaacaacctttattccaattggtcagcgctgctcaaactttcattcctaattccgctggcgccattgctggtaacttgagagaggtgggtcttacattccacttatggcctaacgttcctacactgatttcggaaaatattgaaaattgcttaacaaaggcatttgatcctataggaatatctgaatggaacagtttgttttggattgctcacccatctggacccgcaattctagacgcagtagaagctaaagtcggattggacaaacaaaagcttaaagccaccaggcatattttgtcggaatacggcaatatgtcctcagcctgcgtattatttattttagatgagatgcgtaagaaatccttgaaagagggaaaaaccacaaccggggaaggcttggactggggtgtattatttgggttcggaccaggattgacaatagagactgttgtgctgcacagtgttggcaccgactcaaactaactcgagcatgcatctagagggccgcatcatgtaattagttatgtcacgcttacattcacgccctccccccacatccgctctaaccgaaaaggaaggagttagacaacctgaagtctaggtccctatttatttttttatagttatgttagtattaagaacgttatttatatttcaaatttttcttttttttctgtacagacgcgtgtacgcatgtaacattatactgaaaaccttgcttgagaaggttttgggacgctcgaaggctttaatttgcggccctgcattaatgaatcggccaacgcgcggggagaggcggtttgcgtattgggcgctcttccgcttcctcgctcactgactcgctgcgctcggtcgttcggctgcggcgagcggtatcagctcactcaaaggcggtaatacggttatccacagaatcaggggataacgcaggaaagaacatgtgagcaaaaggccagcaaaagcccaggaaccgtaaaaaggccgcgttgctggcgtttttccataggctccgcccccctgacgagcatcacaaaaatcgacgctcaagtcagaggtggcgaaacccgacaggactataaagataccaggcgtttccccctggaagctccctcgtgcgctctcctgttccgaccctgccgcttaccggatacctgtccgcctttctcccttcgggaagcgtggcgctttctcatagctcacgctgtaggtatctcagttcggtgtaggtcgttcgctccaagctgggctgtgtgcacgaaccccccgttcagcccgaccgctgcgccttatccggtaactatcgtcttgagtccaacccggtaagacacgacttatcgccactggcagcagccactggtaacaggattagcagagcgaggtatgtaggcggtgctacagagttcttgaagtggtggcctaactacggctacactagaaggacagtatttggtatctgcgctctgctgaagccagttaccttcggaaaaagagttggtagctcttgatccggcaaacaaaccaccgctggtagcggtggtttttttgtttgcaagcagcagattacgcgcagaaaaaaaggatctcaagaagatcctttgatcttttctacggggtctgacgctcagtggaacgaaaactcacgttaagggattttggtcatgagattatcaaaaaggatcttcacctagatccttttaaattaaaaatgaagttttaaatcaatctaaagtatatatgagtaaacttggtctgacagttaccaatgcttaatcagtgaggcacctatctcagcgatctgtctatttcgttcatccatagttgcctgactccccgtcgtgtagataactacgatacgggagcgcttaccatctggccccagtgctgcaatgataccgcgagacccacgctcaccggctccagatttatcagcaataaaccagccagccggaagggccgagcgcagaagtggtcctgcaactttatccgcctccattcagtctattaattgttgccgggaagctagagtaagtagttcgccagttaatagtttgcgcaacgttgttggcattgctacaggcatcgtggtgtcactctcgtcgtttggtatggcttcattcagctccggttcccaacgatcaaggcgagttacatgatcccccatgttgtgcaaaaaagcggttagctccttcggtcctccgatcgttgtcagaagtaagttggccgcagtgttatcactcatggttatggcagcactgcataattctcttactgtcatgccatccgtaagatgcttttctgtgactggtgagtactcaaccaagtcattctgagaatagtgtatgcggcgaccgagttgctcttgcccggcgtcaatacgggataatagtgtatcacatagcagaactttaaaagtgctcatcattggaaaacgttcttcggggcgaaaactctcaaggatcttaccgctgttgagatccagttcgatgtaacccactcgtgcacccaactgatcttcagcatcttttactttcaccagcgtttctgggtgagcaaaaacaggaaggcaaaatgccgcaaaaaagggaataagggcgacacggaaatgttgaatactcatactcttcctttttcaatgggtaataactgatataattaaattgaagctctaatttgtgagtttagtatacatgcatttacttataatacagttttttagttttgctggccgcatcttctcaaatatgcttcccagcctgcttttctgtaacgttcaccctctaccttagcatcccttccctttgcaaatagtcctcttccaacaataataatgtcagatcctgtagagaccacatcatccacggttctatactgttgacccaatgcgtctcccttgtcatctaaacccacaccgggtgtcataatcaaccaatcgtaaccttcatctcttccacccatgtctctttgagcaataaagccgataacaaaatctttgtcgctcttcgcaatgtcaacagtacccttagtatattctccagtagatagggagcccttgcatgacaattctgctaacatcaaaaggcctctaggttcctttgttacttcttctgccgcctgcttcaaaccgctaacaatacctgggcccaccacaccgtgtgcattcgtaatgtctgcccattctgctattctgtatacacccgcagagtactgcaatttgactgtattaccaatgtcagcaaattttctgtcttcg

SEQ ID NO: 383 - DNA, 6964 bp, Artificial Sequence
  PLAS482
aagagtaaaaaattgtacttggcggataatgcctttagcggcttaactgtgccctccatggaaaaatcagtcaagatatccacatgtgtttttagtaaacaaattttgggacctaatgcttcaactaactccagtaattccttggtggtacgaacatccaatgaagcacacaagtttgtttgcttttcgtgcatgatattaaatagcttggcagcaacaggactaggatgagtagcagcacgttccttatatgtagctttcgacatgatttatcttcgtttcctgcaggtttttgttctgtgcagttgggttaagaatactgggcaatttcatgtttcttcaacactacatatgcgtatatataccaatctaagtctgtgctccttccttcgttcttccttctgttcggagattaccgaatcaaaaaaatttcaaagaaaccgaaatcaaaaaaaagaataaaaaaaaaatgatgaattgaattgaaaagctagcttatcgatgataagctgtcaaagatgagaattaattccacggactatagactatactagatactccgtctactgtacgatacacttccgctcaggtccttgtcctttaacgaggccttaccactcttttgttactctattgatccagctcagcaaaggcagtgtgatctaagattctatcttcgcgatgtagtaaaactagctagaccgagaaagagactagaaatgcaaaaggcacttctacaatggctgccatcattattatccgatgtgacgctgcagcttctcaatgatattcgaatacgctttgaggagatacagcctaatatccgacaaactgttttacagatttacgatcgtacttgttacccatcattgaattttgaacatccgaacctgggagttttccctgaaacagatagtatatttgaacctgtataataatatatagtctagcgctttacggaagacaatgtatgtatttcggttcctggagaaactattgcatctattgcataggtaatcttgcacgtcgcatccccggttcattttctgcgtttccatcttgcacttcaatagcatatctttgttaacgaagcatctgtgcttcattttgtagaacaaaaatgcaacgcgagagcgctaatttttcaaacaaagaatctgagctgcatttttacagaacagaaatgcaacgcgaaagcgctattttaccaacgaagaatctgtgcttcatttttgtaaaacaaaaatgcaacgcgacgagagcgctaatttttcaaacaaagaatctgagctgcatttttacagaacagaaatgcaacgcgagagcgctattttaccaacaaagaatctatacttcttttttgttctacaaaaatgcatcccgagagcgctatttttctaacaaagcatcttagattactttttttctcctttgtgcgctctataatgcagtctcttgataactttttgcactgtaggtccgttaaggttagaagaaggctactttggtgtctattttctcttccataaaaaaagcctgactccacttcccgcgtttactgattactagcgaagctgcgggtgcattttttcaagataaaggcatccccgattatattctataccgatgtggattgcgcatactttgtgaacagaaagtgatagcgttgatgattcttcattggtcagaaaattatgaacggtttcttctattttgtctctatatactacgtataggaaatgtttacattttcgtattgttttcgattcactctatgaatagttcttactacaatttttttgtctaaagagtaatactagagataaacataaaaaatgtagaggtcgagtttagatgcaagttcaaggagcgaaaggtggatgggtaggttatatagggatatagcacagagatatatagcaaagagatacttttgagcaatgtttgtggaagcggtattcgcaatgggaagctccaccccggttgataatcagaaaagccccaaaaacaggaagattgtataagcaaatatttaaattgtaaacgttaatattttgttaaaattcgcgttaaatttttgttaaatcagctcattttttaacgaatagcccgaaatcggcaaaatcccttataaatcaaaagaatagaccgagatagggttgagtgttgttccagtttccaacaagagtccactattaaagaacgtggactccaacgtcaaagggcgaaaaagggtctatcagggcgatggcccactacgtgaaccatcaccctaatcaagttttttggggtcgaggtgccgtaaagcagtaaatcggaagggtaaacggatgcccccatttagagcttgacggggaaagccggcgaacgtggcgagaaaggaagggaagaaagcgaaaggagcgggggctagggcggtgggaagtgtaggggtcacgctgggcgtaaccaccacacccgccgcgcttaatggggcgctacagggcgcgtggggatgatccactagtacggattagaagccgccgagcgggtgacagccctccgaaggaagactctcctccgtgcgtcctcgtcttcaccggtcgcgttcctgaaacgcagatgtgcctcgcgccgcactgctccgaacaataaagattctacaatactagcttttatggttatgaagaggaaaaattggcagtaacctggccccacaaaccttcaaatgaacgaatcaaattaacaaccataggatgataatgcgattagttttttagccttatttctggggtaattaatcagcgaagcgatgatttttgatctattaacagatatataaatgcaaaaactgcataaccactttaactaatactttcaacattttcggtttgtattacttcttattcaaatgtaataaaagtatcaacaaaaaattgttaatatacctctatactttaacgtcaaggagaaaaaaccccggatcggactactagcagctgtaatacgactcactatagggaatattaagcttaaacaatggcgttggtagaggaaatcaggaacgcacaacgtgcaaaagggcctgcaactgttctggccatcggaactgcaactccagacaactgtttatatcagagcgattttgcagactactatttcagagtcactaagtcagagcacatgactgagttgaagaagaagttcaatcgtatctgcgacaagagcatgattaagaaaagatatatacacttaaccgaggagatgttagaggaacatcccaatataggcgcttacatggcaccaagcttaaatatcaggcaggagataataactgccgaggttcctaagttgggaaaggaagctgccctaaaagctttgaaggaatggggccaacctaaatcaaagatcactcaccttgtcttctgtacgacatccggtgttgagatgccaggagccgactacaaattggccaatctactgggtcttgagccttcagtgagaagagtcatgctataccaccaggggtgctacgctggcggaacggtgttgcgtactgcaaaggacttggctgaaaacaatgcaggtgcccgtgttttggtcgtttgctcagagataacagtggtaaccttcagaggtccgtccgaagacgcattggatagcttggtgggtcaagccttgttcggagatggttctgcagcagtgataattggtagcgatccggacatctcaatagagaggccattattccagttagtaagtgcagcccagacttttatcccgaactccgcaggcgctatagcgggaaacctgagagaggttggattgactttccacctttggccgaatgtgccttcgcttattttcgaaaatatcgaaaactgcttgacaaaggcttttgaccccataggcatctctgactggaattcacttttctggatcgctcaccctggtggcccagcgatactagacgctgtagaggcgaagcttgggttggacaagcagaagctaaaagccacaaagcacatcctatcggagtatggaaacatgtcatcggcttgtgttctgttcattttagacgaaatgaggaagaaatctttaaaggaagggaagactacaactggagaaggcttggattggggtgtccttttcgggttcggtccagggctgaccatagagacggtagtgatacactccgttggtacgtatagtaattgactcgagcatgcatctagagggccgcatcatgtaattagttatgtcacgcttacattcacgccctccccccacatccgctctaaccgaaaaggaaggagttagacaacctgaagtctaggtccctatttatttttttatagttatgttagtattaagaacgttatttatatttcaaatttttcttttttttctgtacagacgcgtgtacgcatgtaacattatactgaaaaccttgcttgagaaggttttgggacgctcgaaggctttaatttgcggccctgcattaatgaatcggccaacgcgcggggagaggcggtttgcgtattgggcgctcttccgcttcctcgctcactgactcgctgcgctcggtcgttcggctgcggcgagcggtatcagctcactcaaaggcggtaatacggttatccacagaatcaggggataacgcaggaaagaacatgtgagcaaaaggccagcaaaagcccaggaaccgtaaaaaggccgcgttgctggcgtttttccataggctccgcccccctgacgagcatcacaaaaatcgacgctcaagtcagaggtggcgaaacccgacaggactataaagataccaggcgtttccccctggaagctccctcgtgcgctctcctgttccgaccctgccgcttaccggatacctgtccgcctttctcccttcgggaagcgtggcgctttctcatagctcacgctgtaggtatctcagttcggtgtaggtcgttcgctccaagctgggctgtgtgcacgaaccccccgttcagcccgaccgctgcgccttatccggtaactatcgtcttgagtccaacccggtaagacacgacttatcgccactggcagcagccactggtaacaggattagcagagcgaggtatgtaggcggtgctacagagttcttgaagtggtggcctaactacggctacactagaaggacagtatttggtatctgcgctctgctgaagccagttaccttcggaaaaagagttggtagctcttgatccggcaaacaaaccaccgctggtagcggtggtttttttgtttgcaagcagcagattacgcgcagaaaaaaaggatctcaagaagatcctttgatcttttctacggggtctgacgctcagtggaacgaaaactcacgttaagggattttggtcatgagattatcaaaaaggatcttcacctagatccttttaaattaaaaatgaagttttaaatcaatctaaagtatatatgagtaaacttggtctgacagttaccaatgcttaatcagtgaggcacctatctcagcgatctgtctatttcgttcatccatagttgcctgactccccgtcgtgtagataactacgatacgggagcgcttaccatctggccccagtgctgcaatgataccgcgagacccacgctcaccggctccagatttatcagcaataaaccagccagccggaagggccgagcgcagaagtggtcctgcaactttatccgcctccattcagtctattaattgttgccgggaagctagagtaagtagttcgccagttaatagtttgcgcaacgttgttggcattgctacaggcatcgtggtgtcactctcgtcgtttggtatggcttcattcagctccggttcccaacgatcaaggcgagttacatgatcccccatgttgtgcaaaaaagcggttagctccttcggtcctccgatcgttgtcagaagtaagttggccgcagtgttatcactcatggttatggcagcactgcataattctcttactgtcatgccatccgtaagatgcttttctgtgactggtgagtactcaaccaagtcattctgagaatagtgtatgcggcgaccgagttgctcttgcccggcgtcaatacgggataatagtgtatcacatagcagaactttaaaagtgctcatcattggaaaacgttcttcggggcgaaaactctcaaggatcttaccgctgttgagatccagttcgatgtaacccactcgtgcacccaactgatcttcagcatcttttactttcaccagcgtttctgggtgagcaaaaacaggaaggcaaaatgccgcaaaaaagggaataagggcgacacggaaatgttgaatactcatactcttcctttttcaatgggtaataactgatataattaaattgaagctctaatttgtgagtttagtatacatgcatttacttataatacagttttttagttttgctggccgcatcttctcaaatatgcttcccagcctgcttttctgtaacgttcaccctctaccttagcatcccttccctttgcaaatagtcctcttccaacaataataatgtcagatcctgtagagaccacatcatccacggttctatactgttgacccaatgcgtctcccttgtcatctaaacccacaccgggtgtcataatcaaccaatcgtaaccttcatctcttccacccatgtctctttgagcaataaagccgataacaaaatctttgtcgctcttcgcaatgtcaacagtacccttagtatattctccagtagatagggagcccttgcatgacaattctgctaacatcaaaaggcctctaggttcctttgttacttcttctgccgcctgcttcaaaccgctaacaatacctgggcccaccacaccgtgtgcattcgtaatgtctgcccattctgctattctgtatacacccgcagagtactgcaatttgactgtattaccaatgtcagcaaattttctgtcttcg

SEQ ID NO: 384 - DNA, 7012 bp, Artificial Sequence
  PLAS483
aagagtaaaaaattgtacttggcggataatgcctttagcggcttaactgtgccctccatggaaaaatcagtcaagatatccacatgtgtttttagtaaacaaattttgggacctaatgcttcaactaactccagtaattccttggtggtacgaacatccaatgaagcacacaagtttgtttgcttttcgtgcatgatattaaatagcttggcagcaacaggactaggatgagtagcagcacgttccttatatgtagctttcgacatgatttatcttcgtttcctgcaggtttttgttctgtgcagttgggttaagaatactgggcaatttcatgtttcttcaacactacatatgcgtatatataccaatctaagtctgtgctccttccttcgttcttccttctgttcggagattaccgaatcaaaaaaatttcaaagaaaccgaaatcaaaaaaaagaataaaaaaaaaatgatgaattgaattgaaaagctagcttatcgatgataagctgtcaaagatgagaattaattccacggactatagactatactagatactccgtctactgtacgatacacttccgctcaggtccttgtcctttaacgaggccttaccactcttttgttactctattgatccagctcagcaaaggcagtgtgatctaagattctatcttcgcgatgtagtaaaactagctagaccgagaaagagactagaaatgcaaaaggcacttctacaatggctgccatcattattatccgatgtgacgctgcagcttctcaatgatattcgaatacgctttgaggagatacagcctaatatccgacaaactgttttacagatttacgatcgtacttgttacccatcattgaattttgaacatccgaacctgggagttttccctgaaacagatagtatatttgaacctgtataataatatatagtctagcgctttacggaagacaatgtatgtatttcggttcctggagaaactattgcatctattgcataggtaatcttgcacgtcgcatccccggttcattttctgcgtttccatcttgcacttcaatagcatatctttgttaacgaagcatctgtgcttcattttgtagaacaaaaatgcaacgcgagagcgctaatttttcaaacaaagaatctgagctgcatttttacagaacagaaatgcaacgcgaaagcgctattttaccaacgaagaatctgtgcttcatttttgtaaaacaaaaatgcaacgcgacgagagcgctaatttttcaaacaaagaatctgagctgcatttttacagaacagaaatgcaacgcgagagcgctattttaccaacaaagaatctatacttcttttttgttctacaaaaatgcatcccgagagcgctatttttctaacaaagcatcttagattactttttttctcctttgtgcgctctataatgcagtctcttgataactttttgcactgtaggtccgttaaggttagaagaaggctactttggtgtctattttctcttccataaaaaaagcctgactccacttcccgcgtttactgattactagcgaagctgcgggtgcattttttcaagataaaggcatccccgattatattctataccgatgtggattgcgcatactttgtgaacagaaagtgatagcgttgatgattcttcattggtcagaaaattatgaacggtttcttctattttgtctctatatactacgtataggaaatgtttacattttcgtattgttttcgattcactctatgaatagttcttactacaatttttttgtctaaagagtaatactagagataaacataaaaaatgtagaggtcgagtttagatgcaagttcaaggagcgaaaggtggatgggtaggttatatagggatatagcacagagatatatagcaaagagatacttttgagcaatgtttgtggaagcggtattcgcaatgggaagctccaccccggttgataatcagaaaagccccaaaaacaggaagattgtataagcaaatatttaaattgtaaacgttaatattttgttaaaattcgcgttaaatttttgttaaatcagctcattttttaacgaatagcccgaaatcggcaaaatcccttataaatcaaaagaatagaccgagatagggttgagtgttgttccagtttccaacaagagtccactattaaagaacgtggactccaacgtcaaagggcgaaaaagggtctatcagggcgatggcccactacgtgaaccatcaccctaatcaagttttttggggtcgaggtgccgtaaagcagtaaatcggaagggtaaacggatgcccccatttagagcttgacggggaaagccggcgaacgtggcgagaaaggaagggaagaaagcgaaaggagcgggggctagggcggtgggaagtgtaggggtcacgctgggcgtaaccaccacacccgccgcgcttaatggggcgctacagggcgcgtggggatgatccactagtacggattagaagccgccgagcgggtgacagccctccgaaggaagactctcctccgtgcgtcctcgtcttcaccggtcgcgttcctgaaacgcagatgtgcctcgcgccgcactgctccgaacaataaagattctacaatactagcttttatggttatgaagaggaaaaattggcagtaacctggccccacaaaccttcaaatgaacgaatcaaattaacaaccataggatgataatgcgattagttttttagccttatttctggggtaattaatcagcgaagcgatgatttttgatctattaacagatatataaatgcaaaaactgcataaccactttaactaatactttcaacattttcggtttgtattacttcttattcaaatgtaataaaagtatcaacaaaaaattgttaatatacctctatactttaacgtcaaggagaaaaaaccccggatcggactactagcagctgtaatacgactcactatagggaatattaagcttaaacaatggcaccagattactcaaacgcgagtcttccaacatggaaatggatgagggtgggcgaaacggcttttgtgaaatgtagtgcttgcaaaggccccgcaactgtattggctatcggtacagctacgcctgataactgtctataccaatctgactttgcagattattactttagagtaacaaaatctgaacatatgactgaactaaagaagaagttcaacagaatctgtgacaagtccatgataaagaagagatacatacatttaacagaggaaatgttggaagaacacccgaacattggcgcttacatggcgccaagtttgaatataagacaagaaatcatcatcgctgaagtaccaaaattgggaaaagaagctgccttgaaagccctaaaagaatggggtcaaccaaaatctaagatcacgcatcttgttttttgtactacatctggtgtcgaaatgccaggggctgattataagcttgcaaatttgctaggcttggagccatcgatccgtcgtgtaatgttatatcatcagggttgctatgcgggaggaacggttttgagaaccgcaaaagacttggctgagaataatgctggtgctcgtgttttggttgtttgctctgaaatcactgttgttacctttagagggccttctgaggacgcgttagactcgctggttggccaggccctattcggcgatggttctgcagcagtcattattgggagtgaccctgatacgagtattgaacgtcccctatttcaattggttagcgcagcacagacttttatcccaaactccgctggggcaattgcaggaaatttaagagaagtaggcttgacatttcatttatggccaaacgtcccaactcttatctcagaaaacatcgaaaattgtttgaccaaagcctttgatcctattggtatcagcgattggaatagcctattttggatagcccaccctggtggccctgcaatacttgatgcagtggaagcaaaacttggactagataaacaaaagttgaaagctactagacacatcctttctgaatacggtaatatgtcctccgcttgtgtcctttttattcttgatgaaatgagaaaaaaatcattgaaagaaggtaaaacgaccacaggcgagggcctggattggggtgttttgtttggttttggacctggtttaaccattgagacagttgtgatccattctgtgggcaccgactctaattaactcgagcatgcatctagagggccgcatcatgtaattagttatgtcacgcttacattcacgccctccccccacatccgctctaaccgaaaaggaaggagttagacaacctgaagtctaggtccctatttatttttttatagttatgttagtattaagaacgttatttatatttcaaatttttcttttttttctgtacagacgcgtgtacgcatgtaacattatactgaaaaccttgcttgagaaggttttgggacgctcgaaggctttaatttgcggccctgcattaatgaatcggccaacgcgcggggagaggcggtttgcgtattgggcgctcttccgcttcctcgctcactgactcgctgcgctcggtcgttcggctgcggcgagcggtatcagctcactcaaaggcggtaatacggttatccacagaatcaggggataacgcaggaaagaacatgtgagcaaaaggccagcaaaagcccaggaaccgtaaaaaggccgcgttgctggcgtttttccataggctccgcccccctgacgagcatcacaaaaatcgacgctcaagtcagaggtggcgaaacccgacaggactataaagataccaggcgtttccccctggaagctccctcgtgcgctctcctgttccgaccctgccgcttaccggatacctgtccgcctttctcccttcgggaagcgtggcgctttctcatagctcacgctgtaggtatctcagttcggtgtaggtcgttcgctccaagctgggctgtgtgcacgaaccccccgttcagcccgaccgctgcgccttatccggtaactatcgtcttgagtccaacccggtaagacacgacttatcgccactggcagcagccactggtaacaggattagcagagcgaggtatgtaggcggtgctacagagttcttgaagtggtggcctaactacggctacactagaaggacagtatttggtatctgcgctctgctgaagccagttaccttcggaaaaagagttggtagctcttgatccggcaaacaaaccaccgctggtagcggtggtttttttgtttgcaagcagcagattacgcgcagaaaaaaaggatctcaagaagatcctttgatcttttctacggggtctgacgctcagtggaacgaaaactcacgttaagggattttggtcatgagattatcaaaaaggatcttcacctagatccttttaaattaaaaatgaagttttaaatcaatctaaagtatatatgagtaaacttggtctgacagttaccaatgcttaatcagtgaggcacctatctcagcgatctgtctatttcgttcatccatagttgcctgactccccgtcgtgtagataactacgatacgggagcgcttaccatctggccccagtgctgcaatgataccgcgagacccacgctcaccggctccagatttatcagcaataaaccagccagccggaagggccgagcgcagaagtggtcctgcaactttatccgcctccattcagtctattaattgttgccgggaagctagagtaagtagttcgccagttaatagtttgcgcaacgttgttggcattgctacaggcatcgtggtgtcactctcgtcgtttggtatggcttcattcagctccggttcccaacgatcaaggcgagttacatgatcccccatgttgtgcaaaaaagcggttagctccttcggtcctccgatcgttgtcagaagtaagttggccgcagtgttatcactcatggttatggcagcactgcataattctcttactgtcatgccatccgtaagatgcttttctgtgactggtgagtactcaaccaagtcattctgagaatagtgtatgcggcgaccgagttgctcttgcccggcgtcaatacgggataatagtgtatcacatagcagaactttaaaagtgctcatcattggaaaacgttcttcggggcgaaaactctcaaggatcttaccgctgttgagatccagttcgatgtaacccactcgtgcacccaactgatcttcagcatcttttactttcaccagcgtttctgggtgagcaaaaacaggaaggcaaaatgccgcaaaaaagggaataagggcgacacggaaatgttgaatactcatactcttcctttttcaatgggtaataactgatataattaaattgaagctctaatttgtgagtttagtatacatgcatttacttataatacagttttttagttttgctggccgcatcttctcaaatatgcttcccagcctgcttttctgtaacgttcaccctctaccttagcatcccttccctttgcaaatagtcctcttccaacaataataatgtcagatcctgtagagaccacatcatccacggttctatactgttgacccaatgcgtctcccttgtcatctaaacccacaccgggtgtcataatcaaccaatcgtaaccttcatctcttccacccatgtctctttgagcaataaagccgataacaaaatctttgtcgctcttcgcaatgtcaacagtacccttagtatattctccagtagatagggagcccttgcatgacaattctgctaacatcaaaaggcctctaggttcctttgttacttcttctgccgcctgcttcaaaccgctaacaatacctgggcccaccacaccgtgtgcattcgtaatgtctgcccattctgctattctgtatacacccgcagagtactgcaatttgactgtattaccaatgtcagcaaattttctgtcttcg

SEQ ID NO: 385 - DNA, 6964 bp, Artificial Sequence
  PLAS484
aagagtaaaaaattgtacttggcggataatgcctttagcggcttaactgtgccctccatggaaaaatcagtcaagatatccacatgtgtttttagtaaacaaattttgggacctaatgcttcaactaactccagtaattccttggtggtacgaacatccaatgaagcacacaagtttgtttgcttttcgtgcatgatattaaatagcttggcagcaacaggactaggatgagtagcagcacgttccttatatgtagctttcgacatgatttatcttcgtttcctgcaggtttttgttctgtgcagttgggttaagaatactgggcaatttcatgtttcttcaacactacatatgcgtatatataccaatctaagtctgtgctccttccttcgttcttccttctgttcggagattaccgaatcaaaaaaatttcaaagaaaccgaaatcaaaaaaaagaataaaaaaaaaatgatgaattgaattgaaaagctagcttatcgatgataagctgtcaaagatgagaattaattccacggactatagactatactagatactccgtctactgtacgatacacttccgctcaggtccttgtcctttaacgaggccttaccactcttttgttactctattgatccagctcagcaaaggcagtgtgatctaagattctatcttcgcgatgtagtaaaactagctagaccgagaaagagactagaaatgcaaaaggcacttctacaatggctgccatcattattatccgatgtgacgctgcagcttctcaatgatattcgaatacgctttgaggagatacagcctaatatccgacaaactgttttacagatttacgatcgtacttgttacccatcattgaattttgaacatccgaacctgggagttttccctgaaacagatagtatatttgaacctgtataataatatatagtctagcgctttacggaagacaatgtatgtatttcggttcctggagaaactattgcatctattgcataggtaatcttgcacgtcgcatccccggttcattttctgcgtttccatcttgcacttcaatagcatatctttgttaacgaagcatctgtgcttcattttgtagaacaaaaatgcaacgcgagagcgctaatttttcaaacaaagaatctgagctgcatttttacagaacagaaatgcaacgcgaaagcgctattttaccaacgaagaatctgtgcttcatttttgtaaaacaaaaatgcaacgcgacgagagcgctaatttttcaaacaaagaatctgagctgcatttttacagaacagaaatgcaacgcgagagcgctattttaccaacaaagaatctatacttcttttttgttctacaaaaatgcatcccgagagcgctatttttctaacaaagcatcttagattactttttttctcctttgtgcgctctataatgcagtctcttgataactttttgcactgtaggtccgttaaggttagaagaaggctactttggtgtctattttctcttccataaaaaaagcctgactccacttcccgcgtttactgattactagcgaagctgcgggtgcattttttcaagataaaggcatccccgattatattctataccgatgtggattgcgcatactttgtgaacagaaagtgatagcgttgatgattcttcattggtcagaaaattatgaacggtttcttctattttgtctctatatactacgtataggaaatgtttacattttcgtattgttttcgattcactctatgaatagttcttactacaatttttttgtctaaagagtaatactagagataaacataaaaaatgtagaggtcgagtttagatgcaagttcaaggagcgaaaggtggatgggtaggttatatagggatatagcacagagatatatagcaaagagatacttttgagcaatgtttgtggaagcggtattcgcaatgggaagctccaccccggttgataatcagaaaagccccaaaaacaggaagattgtataagcaaatatttaaattgtaaacgttaatattttgttaaaattcgcgttaaatttttgttaaatcagctcattttttaacgaatagcccgaaatcggcaaaatcccttataaatcaaaagaatagaccgagatagggttgagtgttgttccagtttccaacaagagtccactattaaagaacgtggactccaacgtcaaagggcgaaaaagggtctatcagggcgatggcccactacgtgaaccatcaccctaatcaagttttttggggtcgaggtgccgtaaagcagtaaatcggaagggtaaacggatgcccccatttagagcttgacggggaaagccggcgaacgtggcgagaaaggaagggaagaaagcgaaaggagcgggggctagggcggtgggaagtgtaggggtcacgctgggcgtaaccaccacacccgccgcgcttaatggggcgctacagggcgcgtggggatgatccactagtacggattagaagccgccgagcgggtgacagccctccgaaggaagactctcctccgtgcgtcctcgtcttcaccggtcgcgttcctgaaacgcagatgtgcctcgcgccgcactgctccgaacaataaagattctacaatactagcttttatggttatgaagaggaaaaattggcagtaacctggccccacaaaccttcaaatgaacgaatcaaattaacaaccataggatgataatgcgattagttttttagccttatttctggggtaattaatcagcgaagcgatgatttttgatctattaacagatatataaatgcaaaaactgcataaccactttaactaatactttcaacattttcggtttgtattacttcttattcaaatgtaataaaagtatcaacaaaaaattgttaatatacctctatactttaacgtcaaggagaaaaaaccccggatcggactactagcagctgtaatacgactcactatagggaatattaagcttaaacaatggcatctgtagaggagataagaaatgcccaaagagccaagggcccagccaccatcttggccatcggcacagcaacacctgataattgcatttaccagtccgattacgcggactactattttagggtaacaaaatctgagcatatgaccgaactgaagaagaaattcaacagaatttgtgagaaatctatgatcaagaagagatacatacacttgaccgaaaagatgcttgaagagcacccgaatattggagcatacatggctccatcgcttaacataagacaggaaataatcaccgctgagatcccgaagttgggcaaagaggcagcgttgaaagcgctgaaggaatggggccagccaaagtccaagattacccacctggttttctgcaccaccagcggagtcgaaatgcccggtgccgactacaagcttgctaaccttcttggtttggataactcagtgaggcgtgtcatgttgtatcaccaaggctgtcatgctggcggaacagtgctgcgtactgcgaaggatttggcggagaacaacgcaggtgcacgtgttttggttgtttgctctgaaattacagtcgtgaccttcaggggaccctcagaagaggctttggactcgcttgttggacaggttctattcggcgacggttcagctgctgtaattgtcggatccgaccctgatctgagtatagaaaggccgcactttcagttaatatctgcggctcagacattcattccgaactctcagggagcgatagcgggtaatttacgtgaggtcggcttaacattccacttgtggcctagtgtgcccactctaatctcagagaacattgagaagtgccttacacaggctttcgaccctctggggatctctgattggaactcactattctggatcgcccatccaggtggacccgccatattagacgcggtagaagccaaattaaatttagagaagaagaagttggaagcaacccgtcacgtcctatcagaatacggtaacatgtcaagcgcttgcgtgttgttcatcctagacgagatgaggaagaagtcgttaaagcgtgagaaggctactacaggagacggactggattggggtgttctgtttggcttcggtcctggtctaaccatagagacagtggtattgagaagtattcctactgtgattaattgactcgagcatgcatctagagggccgcatcatgtaattagttatgtcacgcttacattcacgccctccccccacatccgctctaaccgaaaaggaaggagttagacaacctgaagtctaggtccctatttatttttttatagttatgttagtattaagaacgttatttatatttcaaatttttcttttttttctgtacagacgcgtgtacgcatgtaacattatactgaaaaccttgcttgagaaggttttgggacgctcgaaggctttaatttgcggccctgcattaatgaatcggccaacgcgcggggagaggcggtttgcgtattgggcgctcttccgcttcctcgctcactgactcgctgcgctcggtcgttcggctgcggcgagcggtatcagctcactcaaaggcggtaatacggttatccacagaatcaggggataacgcaggaaagaacatgtgagcaaaaggccagcaaaagcccaggaaccgtaaaaaggccgcgttgctggcgtttttccataggctccgcccccctgacgagcatcacaaaaatcgacgctcaagtcagaggtggcgaaacccgacaggactataaagataccaggcgtttccccctggaagctccctcgtgcgctctcctgttccgaccctgccgcttaccggatacctgtccgcctttctcccttcgggaagcgtggcgctttctcatagctcacgctgtaggtatctcagttcggtgtaggtcgttcgctccaagctgggctgtgtgcacgaaccccccgttcagcccgaccgctgcgccttatccggtaactatcgtcttgagtccaacccggtaagacacgacttatcgccactggcagcagccactggtaacaggattagcagagcgaggtatgtaggcggtgctacagagttcttgaagtggtggcctaactacggctacactagaaggacagtatttggtatctgcgctctgctgaagccagttaccttcggaaaaagagttggtagctcttgatccggcaaacaaaccaccgctggtagcggtggtttttttgtttgcaagcagcagattacgcgcagaaaaaaaggatctcaagaagatcctttgatcttttctacggggtctgacgctcagtggaacgaaaactcacgttaagggattttggtcatgagattatcaaaaaggatcttcacctagatccttttaaattaaaaatgaagttttaaatcaatctaaagtatatatgagtaaacttggtctgacagttaccaatgcttaatcagtgaggcacctatctcagcgatctgtctatttcgttcatccatagttgcctgactccccgtcgtgtagataactacgatacgggagcgcttaccatctggccccagtgctgcaatgataccgcgagacccacgctcaccggctccagatttatcagcaataaaccagccagccggaagggccgagcgcagaagtggtcctgcaactttatccgcctccattcagtctattaattgttgccgggaagctagagtaagtagttcgccagttaatagtttgcgcaacgttgttggcattgctacaggcatcgtggtgtcactctcgtcgtttggtatggcttcattcagctccggttcccaacgatcaaggcgagttacatgatcccccatgttgtgcaaaaaagcggttagctccttcggtcctccgatcgttgtcagaagtaagttggccgcagtgttatcactcatggttatggcagcactgcataattctcttactgtcatgccatccgtaagatgcttttctgtgactggtgagtactcaaccaagtcattctgagaatagtgtatgcggcgaccgagttgctcttgcccggcgtcaatacgggataatagtgtatcacatagcagaactttaaaagtgctcatcattggaaaacgttcttcggggcgaaaactctcaaggatcttaccgctgttgagatccagttcgatgtaacccactcgtgcacccaactgatcttcagcatcttttactttcaccagcgtttctgggtgagcaaaaacaggaaggcaaaatgccgcaaaaaagggaataagggcgacacggaaatgttgaatactcatactcttcctttttcaatgggtaataactgatataattaaattgaagctctaatttgtgagtttagtatacatgcatttacttataatacagttttttagttttgctggccgcatcttctcaaatatgcttcccagcctgcttttctgtaacgttcaccctctaccttagcatcccttccctttgcaaatagtcctcttccaacaataataatgtcagatcctgtagagaccacatcatccacggttctatactgttgacccaatgcgtctcccttgtcatctaaacccacaccgggtgtcataatcaaccaatcgtaaccttcatctcttccacccatgtctctttgagcaataaagccgataacaaaatctttgtcgctcttcgcaatgtcaacagtacccttagtatattctccagtagatagggagcccttgcatgacaattctgctaacatcaaaaggcctctaggttcctttgttacttcttctgccgcctgcttcaaaccgctaacaatacctgggcccaccacaccgtgtgcattcgtaatgtctgcccattctgctattctgtatacacccgcagagtactgcaatttgactgtattaccaatgtcagcaaattttctgtcttcg

SEQ ID NO: 386 - DNA, 6817 bp, Artificial Sequence
  PLAS485
aagagtaaaaaattgtacttggcggataatgcctttagcggcttaactgtgccctccatggaaaaatcagtcaagatatccacatgtgtttttagtaaacaaattttgggacctaatgcttcaactaactccagtaattccttggtggtacgaacatccaatgaagcacacaagtttgtttgcttttcgtgcatgatattaaatagcttggcagcaacaggactaggatgagtagcagcacgttccttatatgtagctttcgacatgatttatcttcgtttcctgcaggtttttgttctgtgcagttgggttaagaatactgggcaatttcatgtttcttcaacactacatatgcgtatatataccaatctaagtctgtgctccttccttcgttcttccttctgttcggagattaccgaatcaaaaaaatttcaaagaaaccgaaatcaaaaaaaagaataaaaaaaaaatgatgaattgaattgaaaagctagcttatcgatgataagctgtcaaagatgagaattaattccacggactatagactatactagatactccgtctactgtacgatacacttccgctcaggtccttgtcctttaacgaggccttaccactcttttgttactctattgatccagctcagcaaaggcagtgtgatctaagattctatcttcgcgatgtagtaaaactagctagaccgagaaagagactagaaatgcaaaaggcacttctacaatggctgccatcattattatccgatgtgacgctgcagcttctcaatgatattcgaatacgctttgaggagatacagcctaatatccgacaaactgttttacagatttacgatcgtacttgttacccatcattgaattttgaacatccgaacctgggagttttccctgaaacagatagtatatttgaacctgtataataatatatagtctagcgctttacggaagacaatgtatgtatttcggttcctggagaaactattgcatctattgcataggtaatcttgcacgtcgcatccccggttcattttctgcgtttccatcttgcacttcaatagcatatctttgttaacgaagcatctgtgcttcattttgtagaacaaaaatgcaacgcgagagcgctaatttttcaaacaaagaatctgagctgcatttttacagaacagaaatgcaacgcgaaagcgctattttaccaacgaagaatctgtgcttcatttttgtaaaacaaaaatgcaacgcgacgagagcgctaatttttcaaacaaagaatctgagctgcatttttacagaacagaaatgcaacgcgagagcgctattttaccaacaaagaatctatacttcttttttgttctacaaaaatgcatcccgagagcgctatttttctaacaaagcatcttagattactttttttctcctttgtgcgctctataatgcagtctcttgataactttttgcactgtaggtccgttaaggttagaagaaggctactttggtgtctattttctcttccataaaaaaagcctgactccacttcccgcgtttactgattactagcgaagctgcgggtgcattttttcaagataaaggcatccccgattatattctataccgatgtggattgcgcatactttgtgaacagaaagtgatagcgttgatgattcttcattggtcagaaaattatgaacggtttcttctattttgtctctatatactacgtataggaaatgtttacattttcgtattgttttcgattcactctatgaatagttcttactacaatttttttgtctaaagagtaatactagagataaacataaaaaatgtagaggtcgagtttagatgcaagttcaaggagcgaaaggtggatgggtaggttatatagggatatagcacagagatatatagcaaagagatacttttgagcaatgtttgtggaagcggtattcgcaatgggaagctccaccccggttgataatcagaaaagccccaaaaacaggaagattgtataagcaaatatttaaattgtaaacgttaatattttgttaaaattcgcgttaaatttttgttaaatcagctcattttttaacgaatagcccgaaatcggcaaaatcccttataaatcaaaagaatagaccgagatagggttgagtgttgttccagtttccaacaagagtccactattaaagaacgtggactccaacgtcaaagggcgaaaaagggtctatcagggcgatggcccactacgtgaaccatcaccctaatcaagttttttggggtcgaggtgccgtaaagcagtaaatcggaagggtaaacggatgcccccatttagagcttgacggggaaagccggcgaacgtggcgagaaaggaagggaagaaagcgaaaggagcgggggctagggcggtgggaagtgtaggggtcacgctgggcgtaaccaccacacccgccgcgcttaatggggcgctacagggcgcgtggggatgatccactagtacggattagaagccgccgagcgggtgacagccctccgaaggaagactctcctccgtgcgtcctcgtcttcaccggtcgcgttcctgaaacgcagatgtgcctcgcgccgcactgctccgaacaataaagattctacaatactagcttttatggttatgaagaggaaaaattggcagtaacctggccccacaaaccttcaaatgaacgaatcaaattaacaaccataggatgataatgcgattagttttttagccttatttctggggtaattaatcagcgaagcgatgatttttgatctattaacagatatataaatgcaaaaactgcataaccactttaactaatactttcaacattttcggtttgtattacttcttattcaaatgtaataaaagtatcaacaaaaaattgttaatatacctctatactttaacgtcaaggagaaaaaaccccggatcggactactagcagctgtaatacgactcactatagggaatattaagcttaaacaatggcaacagagcttaaaaagaagtttaacagaatctgtgaaaaatctatgatcaaaaagagatacatacacttgactgagaagatgcttgaagaacacccaaatataggagcatatatggctccgagcttgaatattagacaagaaattattacagctgaaattcctaaacttggtaaggaagcagctctaaaagcattaaaggagtggggacaaccaaaaagtaaaatcacacacctagtcttttgcactacctctggcgtagaaatgcctggtgctgattacaagttggcgaacttattgggactggataatagcgtaagaagagtaatgctgtaccatcagggttgtcatgcgggaggtactgttttaagaacagccaaggatttagctgaaaataatgccggcgctcgtgttttggtggtgtgttcagaaatcactgttgttacattcaggggtccatcagaagaagctttggatagcttggttgggcaagtgttatttggtgatggttccgctgctgttattgtagggtccgatcccgatatcagtattgaaagacctcatttccaactgatttcagctgcacaaacttttatacctaactcccaaggtgctattgctggtaacttacgtgaagtaggtctgaccttccatctgtggccctcagtccctactctgatatccgaaaatatcgaacagtgtttgactaaggctttcgatccattgggtataagtgattggaattcaattttttggatagcgcatcctggtgggccggctatccttgatgccgtcgaggctaagttgaatttggagaaaaaaaaattagaagctactaggcatgtcctttcagaatatggaaacatgtcttccgcctgcgtgttgtttatcttagatgagatgagaaagaaatctttaaaacgtgaaaaggcaacgcctggtgacggtttagattggggagtgctttttggctttggtccaggtttgacaatagaaaccgtggtcttgagatcaattcctactgtatgactcgagcatgcatctagagggccgcatcatgtaattagttatgtcacgcttacattcacgccctccccccacatccgctctaaccgaaaaggaaggagttagacaacctgaagtctaggtccctatttatttttttatagttatgttagtattaagaacgttatttatatttcaaatttttcttttttttctgtacagacgcgtgtacgcatgtaacattatactgaaaaccttgcttgagaaggttttgggacgctcgaaggctttaatttgcggccctgcattaatgaatcggccaacgcgcggggagaggcggtttgcgtattgggcgctcttccgcttcctcgctcactgactcgctgcgctcggtcgttcggctgcggcgagcggtatcagctcactcaaaggcggtaatacggttatccacagaatcaggggataacgcaggaaagaacatgtgagcaaaaggccagcaaaagcccaggaaccgtaaaaaggccgcgttgctggcgtttttccataggctccgcccccctgacgagcatcacaaaaatcgacgctcaagtcagaggtggcgaaacccgacaggactataaagataccaggcgtttccccctggaagctccctcgtgcgctctcctgttccgaccctgccgcttaccggatacctgtccgcctttctcccttcgggaagcgtggcgctttctcatagctcacgctgtaggtatctcagttcggtgtaggtcgttcgctccaagctgggctgtgtgcacgaaccccccgttcagcccgaccgctgcgccttatccggtaactatcgtcttgagtccaacccggtaagacacgacttatcgccactggcagcagccactggtaacaggattagcagagcgaggtatgtaggcggtgctacagagttcttgaagtggtggcctaactacggctacactagaaggacagtatttggtatctgcgctctgctgaagccagttaccttcggaaaaagagttggtagctcttgatccggcaaacaaaccaccgctggtagcggtggtttttttgtttgcaagcagcagattacgcgcagaaaaaaaggatctcaagaagatcctttgatcttttctacggggtctgacgctcagtggaacgaaaactcacgttaagggattttggtcatgagattatcaaaaaggatcttcacctagatccttttaaattaaaaatgaagttttaaatcaatctaaagtatatatgagtaaacttggtctgacagttaccaatgcttaatcagtgaggcacctatctcagcgatctgtctatttcgttcatccatagttgcctgactccccgtcgtgtagataactacgatacgggagcgcttaccatctggccccagtgctgcaatgataccgcgagacccacgctcaccggctccagatttatcagcaataaaccagccagccggaagggccgagcgcagaagtggtcctgcaactttatccgcctccattcagtctattaattgttgccgggaagctagagtaagtagttcgccagttaatagtttgcgcaacgttgttggcattgctacaggcatcgtggtgtcactctcgtcgtttggtatggcttcattcagctccggttcccaacgatcaaggcgagttacatgatcccccatgttgtgcaaaaaagcggttagctccttcggtcctccgatcgttgtcagaagtaagttggccgcagtgttatcactcatggttatggcagcactgcataattctcttactgtcatgccatccgtaagatgcttttctgtgactggtgagtactcaaccaagtcattctgagaatagtgtatgcggcgaccgagttgctcttgcccggcgtcaatacgggataatagtgtatcacatagcagaactttaaaagtgctcatcattggaaaacgttcttcggggcgaaaactctcaaggatcttaccgctgttgagatccagttcgatgtaacccactcgtgcacccaactgatcttcagcatcttttactttcaccagcgtttctgggtgagcaaaaacaggaaggcaaaatgccgcaaaaaagggaataagggcgacacggaaatgttgaatactcatactcttcctttttcaatgggtaataactgatataattaaattgaagctctaatttgtgagtttagtatacatgcatttacttataatacagttttttagttttgctggccgcatcttctcaaatatgcttcccagcctgcttttctgtaacgttcaccctctaccttagcatcccttccctttgcaaatagtcctcttccaacaataataatgtcagatcctgtagagaccacatcatccacggttctatactgttgacccaatgcgtctcccttgtcatctaaacccacaccgggtgtcataatcaaccaatcgtaaccttcatctcttccacccatgtctctttgagcaataaagccgataacaaaatctttgtcgctcttcgcaatgtcaacagtacccttagtatattctccagtagatagggagcccttgcatgacaattctgctaacatcaaaaggcctctaggttcctttgttacttcttctgccgcctgcttcaaaccgctaacaatacctgggcccaccacaccgtgtgcattcgtaatgtctgcccattctgctattctgtatacacccgcagagtactgcaatttgactgtattaccaatgtcagcaaattttctgtcttcg

SEQ ID NO: 387 - DNA, 6964 bp, Artificial Sequence
  PLAS486
aagagtaaaaaattgtacttggcggataatgcctttagcggcttaactgtgccctccatggaaaaatcagtcaagatatccacatgtgtttttagtaaacaaattttgggacctaatgcttcaactaactccagtaattccttggtggtacgaacatccaatgaagcacacaagtttgtttgcttttcgtgcatgatattaaatagcttggcagcaacaggactaggatgagtagcagcacgttccttatatgtagctttcgacatgatttatcttcgtttcctgcaggtttttgttctgtgcagttgggttaagaatactgggcaatttcatgtttcttcaacactacatatgcgtatatataccaatctaagtctgtgctccttccttcgttcttccttctgttcggagattaccgaatcaaaaaaatttcaaagaaaccgaaatcaaaaaaaagaataaaaaaaaaatgatgaattgaattgaaaagctagcttatcgatgataagctgtcaaagatgagaattaattccacggactatagactatactagatactccgtctactgtacgatacacttccgctcaggtccttgtcctttaacgaggccttaccactcttttgttactctattgatccagctcagcaaaggcagtgtgatctaagattctatcttcgcgatgtagtaaaactagctagaccgagaaagagactagaaatgcaaaaggcacttctacaatggctgccatcattattatccgatgtgacgctgcagcttctcaatgatattcgaatacgctttgaggagatacagcctaatatccgacaaactgttttacagatttacgatcgtacttgttacccatcattgaattttgaacatccgaacctgggagttttccctgaaacagatagtatatttgaacctgtataataatatatagtctagcgctttacggaagacaatgtatgtatttcggttcctggagaaactattgcatctattgcataggtaatcttgcacgtcgcatccccggttcattttctgcgtttccatcttgcacttcaatagcatatctttgttaacgaagcatctgtgcttcattttgtagaacaaaaatgcaacgcgagagcgctaatttttcaaacaaagaatctgagctgcatttttacagaacagaaatgcaacgcgaaagcgctattttaccaacgaagaatctgtgcttcatttttgtaaaacaaaaatgcaacgcgacgagagcgctaatttttcaaacaaagaatctgagctgcatttttacagaacagaaatgcaacgcgagagcgctattttaccaacaaagaatctatacttcttttttgttctacaaaaatgcatcccgagagcgctatttttctaacaaagcatcttagattactttttttctcctttgtgcgctctataatgcagtctcttgataactttttgcactgtaggtccgttaaggttagaagaaggctactttggtgtctattttctcttccataaaaaaagcctgactccacttcccgcgtttactgattactagcgaagctgcgggtgcattttttcaagataaaggcatccccgattatattctataccgatgtggattgcgcatactttgtgaacagaaagtgatagcgttgatgattcttcattggtcagaaaattatgaacggtttcttctattttgtctctatatactacgtataggaaatgtttacattttcgtattgttttcgattcactctatgaatagttcttactacaatttttttgtctaaagagtaatactagagataaacataaaaaatgtagaggtcgagtttagatgcaagttcaaggagcgaaaggtggatgggtaggttatatagggatatagcacagagatatatagcaaagagatacttttgagcaatgtttgtggaagcggtattcgcaatgggaagctccaccccggttgataatcagaaaagccccaaaaacaggaagattgtataagcaaatatttaaattgtaaacgttaatattttgttaaaattcgcgttaaatttttgttaaatcagctcattttttaacgaatagcccgaaatcggcaaaatcccttataaatcaaaagaatagaccgagatagggttgagtgttgttccagtttccaacaagagtccactattaaagaacgtggactccaacgtcaaagggcgaaaaagggtctatcagggcgatggcccactacgtgaaccatcaccctaatcaagttttttggggtcgaggtgccgtaaagcagtaaatcggaagggtaaacggatgcccccatttagagcttgacggggaaagccggcgaacgtggcgagaaaggaagggaagaaagcgaaaggagcgggggctagggcggtgggaagtgtaggggtcacgctgggcgtaaccaccacacccgccgcgcttaatggggcgctacagggcgcgtggggatgatccactagtacggattagaagccgccgagcgggtgacagccctccgaaggaagactctcctccgtgcgtcctcgtcttcaccggtcgcgttcctgaaacgcagatgtgcctcgcgccgcactgctccgaacaataaagattctacaatactagcttttatggttatgaagaggaaaaattggcagtaacctggccccacaaaccttcaaatgaacgaatcaaattaacaaccataggatgataatgcgattagttttttagccttatttctggggtaattaatcagcgaagcgatgatttttgatctattaacagatatataaatgcaaaaactgcataaccactttaactaatactttcaacattttcggtttgtattacttcttattcaaatgtaataaaagtatcaacaaaaaattgttaatatacctctatactttaacgtcaaggagaaaaaaccccggatcggactactagcagctgtaatacgactcactatagggaatattaagcttaaacaatggcttctgtggaagagataaggaatgctcaaagagctaaagggccagcgacaatattagctatcggaacggccacgcccgatcactgcgtatatcaaagtgattacgctgactactatttcagagttacaaaaagcgagcacatgacagaactgaaaaaaaagtttaacagaatttgtgaaaaatctatgataaaaaagagatatattcacttaactgaaaaaatgttagaagaacatccaaacataggtgcttatatggctccctctttgaacattcgtcaagagattattactgcagaaattccaaaattgggcaaggaagcagcgttaaaggcactaaaagaatggggccagccgaaaagtaagatcacacatcttgttttttgcactaccagtggtgtggaaatgcctggtgcagactataaattggcaaacttgctgggattagacaattctgttagaagggtgatgctgtatcatcaaggatgtcatgcaggcggcacggtattgagaacggccaaagatttggcagaaaataacgcgggggccagggttttagtcgtttgtagtgaggcaacagttgtgacttttaggggacctagcgaagatgccttggatagtttggtaggtcaagttttatttggtgacggttcagctgcagtaatcgtgggttccgaccctgacatttcaatagaaagacctttattccaattaatttcggccgcacagaccttcattcctaattctcaaggggccatagcaggtaatttaagagaagtcgggttaacctttcatttgtggccgtctgttccaaccttaatcagcgaaaacatcgaacaatgtttgacaaaagccttcgatcctctaggcatctctgattggaattcccttttttggattgcccatccaggtggcccagctattttggatgcagtggaagctaaattaaacctagaaaagaagaaactggaagctactaggcacgtattatctgaatacggaaacatgtcctccgcctgcgttttgtttatattggacgaaatgagaaaaaaatccttgaagaaagaaaacataacaacgggtgagggtttggactggggtgtgttgttcggttttggtccaggattaaccatcgagactgttgttctacattctgtggccactggaacgaattaactcgagcatgcatctagagggccgcatcatgtaattagttatgtcacgcttacattcacgccctccccccacatccgctctaaccgaaaaggaaggagttagacaacctgaagtctaggtccctatttatttttttatagttatgttagtattaagaacgttatttatatttcaaatttttcttttttttctgtacagacgcgtgtacgcatgtaacattatactgaaaaccttgcttgagaaggttttgggacgctcgaaggctttaatttgcggccctgcattaatgaatcggccaacgcgcggggagaggcggtttgcgtattgggcgctcttccgcttcctcgctcactgactcgctgcgctcggtcgttcggctgcggcgagcggtatcagctcactcaaaggcggtaatacggttatccacagaatcaggggataacgcaggaaagaacatgtgagcaaaaggccagcaaaagcccaggaaccgtaaaaaggccgcgttgctggcgtttttccataggctccgcccccctgacgagcatcacaaaaatcgacgctcaagtcagaggtggcgaaacccgacaggactataaagataccaggcgtttccccctggaagctccctcgtgcgctctcctgttccgaccctgccgcttaccggatacctgtccgcctttctcccttcgggaagcgtggcgctttctcatagctcacgctgtaggtatctcagttcggtgtaggtcgttcgctccaagctgggctgtgtgcacgaaccccccgttcagcccgaccgctgcgccttatccggtaactatcgtcttgagtccaacccggtaagacacgacttatcgccactggcagcagccactggtaacaggattagcagagcgaggtatgtaggcggtgctacagagttcttgaagtggtggcctaactacggctacactagaaggacagtatttggtatctgcgctctgctgaagccagttaccttcggaaaaagagttggtagctcttgatccggcaaacaaaccaccgctggtagcggtggtttttttgtttgcaagcagcagattacgcgcagaaaaaaaggatctcaagaagatcctttgatcttttctacggggtctgacgctcagtggaacgaaaactcacgttaagggattttggtcatgagattatcaaaaaggatcttcacctagatccttttaaattaaaaatgaagttttaaatcaatctaaagtatatatgagtaaacttggtctgacagttaccaatgcttaatcagtgaggcacctatctcagcgatctgtctatttcgttcatccatagttgcctgactccccgtcgtgtagataactacgatacgggagcgcttaccatctggccccagtgctgcaatgataccgcgagacccacgctcaccggctccagatttatcagcaataaaccagccagccggaagggccgagcgcagaagtggtcctgcaactttatccgcctccattcagtctattaattgttgccgggaagctagagtaagtagttcgccagttaatagtttgcgcaacgttgttggcattgctacaggcatcgtggtgtcactctcgtcgtttggtatggcttcattcagctccggttcccaacgatcaaggcgagttacatgatcccccatgttgtgcaaaaaagcggttagctccttcggtcctccgatcgttgtcagaagtaagttggccgcagtgttatcactcatggttatggcagcactgcataattctcttactgtcatgccatccgtaagatgcttttctgtgactggtgagtactcaaccaagtcattctgagaatagtgtatgcggcgaccgagttgctcttgcccggcgtcaatacgggataatagtgtatcacatagcagaactttaaaagtgctcatcattggaaaacgttcttcggggcgaaaactctcaaggatcttaccgctgttgagatccagttcgatgtaacccactcgtgcacccaactgatcttcagcatcttttactttcaccagcgtttctgggtgagcaaaaacaggaaggcaaaatgccgcaaaaaagggaataagggcgacacggaaatgttgaatactcatactcttcctttttcaatgggtaataactgatataattaaattgaagctctaatttgtgagtttagtatacatgcatttacttataatacagttttttagttttgctggccgcatcttctcaaatatgcttcccagcctgcttttctgtaacgttcaccctctaccttagcatcccttccctttgcaaatagtcctcttccaacaataataatgtcagatcctgtagagaccacatcatccacggttctatactgttgacccaatgcgtctcccttgtcatctaaacccacaccgggtgtcataatcaaccaatcgtaaccttcatctcttccacccatgtctctttgagcaataaagccgataacaaaatctttgtcgctcttcgcaatgtcaacagtacccttagtatattctccagtagatagggagcccttgcatgacaattctgctaacatcaaaaggcctctaggttcctttgttacttcttctgccgcctgcttcaaaccgctaacaatacctgggcccaccacaccgtgtgcattcgtaatgtctgcccattctgctattctgtatacacccgcagagtactgcaatttgactgtattaccaatgtcagcaaattttctgtcttcg

SEQ ID NO: 388 - DNA, 6964 bp, Artificial Sequence
  PLAS487
aagagtaaaaaattgtacttggcggataatgcctttagcggcttaactgtgccctccatggaaaaatcagtcaagatatccacatgtgtttttagtaaacaaattttgggacctaatgcttcaactaactccagtaattccttggtggtacgaacatccaatgaagcacacaagtttgtttgcttttcgtgcatgatattaaatagcttggcagcaacaggactaggatgagtagcagcacgttccttatatgtagctttcgacatgatttatcttcgtttcctgcaggtttttgttctgtgcagttgggttaagaatactgggcaatttcatgtttcttcaacactacatatgcgtatatataccaatctaagtctgtgctccttccttcgttcttccttctgttcggagattaccgaatcaaaaaaatttcaaagaaaccgaaatcaaaaaaaagaataaaaaaaaaatgatgaattgaattgaaaagctagcttatcgatgataagctgtcaaagatgagaattaattccacggactatagactatactagatactccgtctactgtacgatacacttccgctcaggtccttgtcctttaacgaggccttaccactcttttgttactctattgatccagctcagcaaaggcagtgtgatctaagattctatcttcgcgatgtagtaaaactagctagaccgagaaagagactagaaatgcaaaaggcacttctacaatggctgccatcattattatccgatgtgacgctgcagcttctcaatgatattcgaatacgctttgaggagatacagcctaatatccgacaaactgttttacagatttacgatcgtacttgttacccatcattgaattttgaacatccgaacctgggagttttccctgaaacagatagtatatttgaacctgtataataatatatagtctagcgctttacggaagacaatgtatgtatttcggttcctggagaaactattgcatctattgcataggtaatcttgcacgtcgcatccccggttcattttctgcgtttccatcttgcacttcaatagcatatctttgttaacgaagcatctgtgcttcattttgtagaacaaaaatgcaacgcgagagcgctaatttttcaaacaaagaatctgagctgcatttttacagaacagaaatgcaacgcgaaagcgctattttaccaacgaagaatctgtgcttcatttttgtaaaacaaaaatgcaacgcgacgagagcgctaatttttcaaacaaagaatctgagctgcatttttacagaacagaaatgcaacgcgagagcgctattttaccaacaaagaatctatacttcttttttgttctacaaaaatgcatcccgagagcgctatttttctaacaaagcatcttagattactttttttctcctttgtgcgctctataatgcagtctcttgataactttttgcactgtaggtccgttaaggttagaagaaggctactttggtgtctattttctcttccataaaaaaagcctgactccacttcccgcgtttactgattactagcgaagctgcgggtgcattttttcaagataaaggcatccccgattatattctataccgatgtggattgcgcatactttgtgaacagaaagtgatagcgttgatgattcttcattggtcagaaaattatgaacggtttcttctattttgtctctatatactacgtataggaaatgtttacattttcgtattgttttcgattcactctatgaatagttcttactacaatttttttgtctaaagagtaatactagagataaacataaaaaatgtagaggtcgagtttagatgcaagttcaaggagcgaaaggtggatgggtaggttatatagggatatagcacagagatatatagcaaagagatacttttgagcaatgtttgtggaagcggtattcgcaatgggaagctccaccccggttgataatcagaaaagccccaaaaacaggaagattgtataagcaaatatttaaattgtaaacgttaatattttgttaaaattcgcgttaaatttttgttaaatcagctcattttttaacgaatagcccgaaatcggcaaaatcccttataaatcaaaagaatagaccgagatagggttgagtgttgttccagtttccaacaagagtccactattaaagaacgtggactccaacgtcaaagggcgaaaaagggtctatcagggcgatggcccactacgtgaaccatcaccctaatcaagttttttggggtcgaggtgccgtaaagcagtaaatcggaagggtaaacggatgcccccatttagagcttgacggggaaagccggcgaacgtggcgagaaaggaagggaagaaagcgaaaggagcgggggctagggcggtgggaagtgtaggggtcacgctgggcgtaaccaccacacccgccgcgcttaatggggcgctacagggcgcgtggggatgatccactagtacggattagaagccgccgagcgggtgacagccctccgaaggaagactctcctccgtgcgtcctcgtcttcaccggtcgcgttcctgaaacgcagatgtgcctcgcgccgcactgctccgaacaataaagattctacaatactagcttttatggttatgaagaggaaaaattggcagtaacctggccccacaaaccttcaaatgaacgaatcaaattaacaaccataggatgataatgcgattagttttttagccttatttctggggtaattaatcagcgaagcgatgatttttgatctattaacagatatataaatgcaaaaactgcataaccactttaactaatactttcaacattttcggtttgtattacttcttattcaaatgtaataaaagtatcaacaaaaaattgttaatatacctctatactttaacgtcaaggagaaaaaaccccggatcggactactagcagctgtaatacgactcactatagggaatattaagcttaaacaatggcatcagttgaggaaatcagaaatgctcagcgtgcaaaaggtcctgcaactgttctagctattggaaccgctaccccggataactgcttatatcaatctgactttgccgattactacttccgtgttaccaaatccgaacatatgactgaattcaagaagaagtttaatagaatatgtgataaatctatgattaaaaagaggtactctcatctaactgaagagatgttggaggaacatcctaatatcggtgcctatatggctccttctctaaatatcagacaagaaataattaccgcagaggtaccaaagtttggtaaagaagccgccctaaaagcgctaaaggaatggggtcagcccaaaagtaaaataactcatttggtattctgtactacctctggtgttgagatgcctggtgcagattacaaacttgctaatttattaggtttggaaccgtctgtaagaagagttatgctatatcatcaagggtgttatgcaggtggtacggtattaagaacggcaaaggatttagccgaaaataatgcgggtgccagagtgttggtggtttgttctgaaattactgttgtcacttttagaggaccctcagaagatgcgttagatagcttagttggccaagcgttgtttggtgatggctcagctgctgtaatcgttggatcagatcctgatattagtattgaaagaccattatttcagttggtatctgctgcccaaacctttataccaaactcaactggcgctattgcaggaaacttgagagaggtcggtttgacttttcatttgtggccgaacgtatccactctaatctcagaaaatattgaaaaatgccttacacaggccttcgatcctttaggcatcagtgattggaactctcttttttggatagctcatcctggggaccccgcaattctggatgctgtagaggctaaactaaaccttgataagaagaagctagaagctacacgtcatgtcttatcagagtatggcaatatgagttcagcttgtgtcttgtttatacttgatgagatgagaaaaaaatcattaaagggggagagagctacaactggcgagggcttggattggggtgttttgttcggttttggtccaggactaaccatcgaaacagttgtgttacacagtattccaaccgtcacaaattaactcgagcatgcatctagagggccgcatcatgtaattagttatgtcacgcttacattcacgccctccccccacatccgctctaaccgaaaaggaaggagttagacaacctgaagtctaggtccctatttatttttttatagttatgttagtattaagaacgttatttatatttcaaatttttcttttttttctgtacagacgcgtgtacgcatgtaacattatactgaaaaccttgcttgagaaggttttgggacgctcgaaggctttaatttgcggccctgcattaatgaatcggccaacgcgcggggagaggcggtttgcgtattgggcgctcttccgcttcctcgctcactgactcgctgcgctcggtcgttcggctgcggcgagcggtatcagctcactcaaaggcggtaatacggttatccacagaatcaggggataacgcaggaaagaacatgtgagcaaaaggccagcaaaagcccaggaaccgtaaaaaggccgcgttgctggcgtttttccataggctccgcccccctgacgagcatcacaaaaatcgacgctcaagtcagaggtggcgaaacccgacaggactataaagataccaggcgtttccccctggaagctccctcgtgcgctctcctgttccgaccctgccgcttaccggatacctgtccgcctttctcccttcgggaagcgtggcgctttctcatagctcacgctgtaggtatctcagttcggtgtaggtcgttcgctccaagctgggctgtgtgcacgaaccccccgttcagcccgaccgctgcgccttatccggtaactatcgtcttgagtccaacccggtaagacacgacttatcgccactggcagcagccactggtaacaggattagcagagcgaggtatgtaggcggtgctacagagttcttgaagtggtggcctaactacggctacactagaaggacagtatttggtatctgcgctctgctgaagccagttaccttcggaaaaagagttggtagctcttgatccggcaaacaaaccaccgctggtagcggtggtttttttgtttgcaagcagcagattacgcgcagaaaaaaaggatctcaagaagatcctttgatcttttctacggggtctgacgctcagtggaacgaaaactcacgttaagggattttggtcatgagattatcaaaaaggatcttcacctagatccttttaaattaaaaatgaagttttaaatcaatctaaagtatatatgagtaaacttggtctgacagttaccaatgcttaatcagtgaggcacctatctcagcgatctgtctatttcgttcatccatagttgcctgactccccgtcgtgtagataactacgatacgggagcgcttaccatctggccccagtgctgcaatgataccgcgagacccacgctcaccggctccagatttatcagcaataaaccagccagccggaagggccgagcgcagaagtggtcctgcaactttatccgcctccattcagtctattaattgttgccgggaagctagagtaagtagttcgccagttaatagtttgcgcaacgttgttggcattgctacaggcatcgtggtgtcactctcgtcgtttggtatggcttcattcagctccggttcccaacgatcaaggcgagttacatgatcccccatgttgtgcaaaaaagcggttagctccttcggtcctccgatcgttgtcagaagtaagttggccgcagtgttatcactcatggttatggcagcactgcataattctcttactgtcatgccatccgtaagatgcttttctgtgactggtgagtactcaaccaagtcattctgagaatagtgtatgcggcgaccgagttgctcttgcccggcgtcaatacgggataatagtgtatcacatagcagaactttaaaagtgctcatcattggaaaacgttcttcggggcgaaaactctcaaggatcttaccgctgttgagatccagttcgatgtaacccactcgtgcacccaactgatcttcagcatcttttactttcaccagcgtttctgggtgagcaaaaacaggaaggcaaaatgccgcaaaaaagggaataagggcgacacggaaatgttgaatactcatactcttcctttttcaatgggtaataactgatataattaaattgaagctctaatttgtgagtttagtatacatgcatttacttataatacagttttttagttttgctggccgcatcttctcaaatatgcttcccagcctgcttttctgtaacgttcaccctctaccttagcatcccttccctttgcaaatagtcctcttccaacaataataatgtcagatcctgtagagaccacatcatccacggttctatactgttgacccaatgcgtctcccttgtcatctaaacccacaccgggtgtcataatcaaccaatcgtaaccttcatctcttccacccatgtctctttgagcaataaagccgataacaaaatctttgtcgctcttcgcaatgtcaacagtacccttagtatattctccagtagatagggagcccttgcatgacaattctgctaacatcaaaaggcctctaggttcctttgttacttcttctgccgcctgcttcaaaccgctaacaatacctgggcccaccacaccgtgtgcattcgtaatgtctgcccattctgctattctgtatacacccgcagagtactgcaatttgactgtattaccaatgtcagcaaattttctgtcttcg

SEQ ID NO: 389 - DNA, 6775 bp, Artificial Sequence
  PLAS488
aagagtaaaaaattgtacttggcggataatgcctttagcggcttaactgtgccctccatggaaaaatcagtcaagatatccacatgtgtttttagtaaacaaattttgggacctaatgcttcaactaactccagtaattccttggtggtacgaacatccaatgaagcacacaagtttgtttgcttttcgtgcatgatattaaatagcttggcagcaacaggactaggatgagtagcagcacgttccttatatgtagctttcgacatgatttatcttcgtttcctgcaggtttttgttctgtgcagttgggttaagaatactgggcaatttcatgtttcttcaacactacatatgcgtatatataccaatctaagtctgtgctccttccttcgttcttccttctgttcggagattaccgaatcaaaaaaatttcaaagaaaccgaaatcaaaaaaaagaataaaaaaaaaatgatgaattgaattgaaaagctagcttatcgatgataagctgtcaaagatgagaattaattccacggactatagactatactagatactccgtctactgtacgatacacttccgctcaggtccttgtcctttaacgaggccttaccactcttttgttactctattgatccagctcagcaaaggcagtgtgatctaagattctatcttcgcgatgtagtaaaactagctagaccgagaaagagactagaaatgcaaaaggcacttctacaatggctgccatcattattatccgatgtgacgctgcagcttctcaatgatattcgaatacgctttgaggagatacagcctaatatccgacaaactgttttacagatttacgatcgtacttgttacccatcattgaattttgaacatccgaacctgggagttttccctgaaacagatagtatatttgaacctgtataataatatatagtctagcgctttacggaagacaatgtatgtatttcggttcctggagaaactattgcatctattgcataggtaatcttgcacgtcgcatccccggttcattttctgcgtttccatcttgcacttcaatagcatatctttgttaacgaagcatctgtgcttcattttgtagaacaaaaatgcaacgcgagagcgctaatttttcaaacaaagaatctgagctgcatttttacagaacagaaatgcaacgcgaaagcgctattttaccaacgaagaatctgtgcttcatttttgtaaaacaaaaatgcaacgcgacgagagcgctaatttttcaaacaaagaatctgagctgcatttttacagaacagaaatgcaacgcgagagcgctattttaccaacaaagaatctatacttcttttttgttctacaaaaatgcatcccgagagcgctatttttctaacaaagcatcttagattactttttttctcctttgtgcgctctataatgcagtctcttgataactttttgcactgtaggtccgttaaggttagaagaaggctactttggtgtctattttctcttccataaaaaaagcctgactccacttcccgcgtttactgattactagcgaagctgcgggtgcattttttcaagataaaggcatccccgattatattctataccgatgtggattgcgcatactttgtgaacagaaagtgatagcgttgatgattcttcattggtcagaaaattatgaacggtttcttctattttgtctctatatactacgtataggaaatgtttacattttcgtattgttttcgattcactctatgaatagttcttactacaatttttttgtctaaagagtaatactagagataaacataaaaaatgtagaggtcgagtttagatgcaagttcaaggagcgaaaggtggatgggtaggttatatagggatatagcacagagatatatagcaaagagatacttttgagcaatgtttgtggaagcggtattcgcaatgggaagctccaccccggttgataatcagaaaagccccaaaaacaggaagattgtataagcaaatatttaaattgtaaacgttaatattttgttaaaattcgcgttaaatttttgttaaatcagctcattttttaacgaatagcccgaaatcggcaaaatcccttataaatcaaaagaatagaccgagatagggttgagtgttgttccagtttccaacaagagtccactattaaagaacgtggactccaacgtcaaagggcgaaaaagggtctatcagggcgatggcccactacgtgaaccatcaccctaatcaagttttttggggtcgaggtgccgtaaagcagtaaatcggaagggtaaacggatgcccccatttagagcttgacggggaaagccggcgaacgtggcgagaaaggaagggaagaaagcgaaaggagcgggggctagggcggtgggaagtgtaggggtcacgctgggcgtaaccaccacacccgccgcgcttaatggggcgctacagggcgcgtggggatgatccactagtacggattagaagccgccgagcgggtgacagccctccgaaggaagactctcctccgtgcgtcctcgtcttcaccggtcgcgttcctgaaacgcagatgtgcctcgcgccgcactgctccgaacaataaagattctacaatactagcttttatggttatgaagaggaaaaattggcagtaacctggccccacaaaccttcaaatgaacgaatcaaattaacaaccataggatgataatgcgattagttttttagccttatttctggggtaattaatcagcgaagcgatgatttttgatctattaacagatatataaatgcaaaaactgcataaccactttaactaatactttcaacattttcggtttgtattacttcttattcaaatgtaataaaagtatcaacaaaaaattgttaatatacctctatactttaacgtcaaggagaaaaaaccccggatcggactactagcagctgtaatacgactcactatagggaatattaagcttaaacaatggcttctgtagaggaaattagaaatgcccaaagagctaaaggtccagctactattttggctattggcacagctacgccagatcattgcgtttaccaatcagattatgcagactattatttccgtgttacgaaatctgaacatatgacagaattaaagaagaagtttaatcgtatctgcgacaaatctatgattaaaaaaagatacattcatttaacagaagaaatgcttgaagagcatccaaacatcggtgcttacatggcaccttctttgaatatccgtcaagagattattaccgctgaagtaccaaaactaggaaaggaagcggcgttgaaggctctgaaggaatggggtcagccaaagtctaaaataactcaccttgtgttctgtacgacatccggagtcgagatgccaggagcggactacaaactggcaaaccttttgggtttggaaacttctgtccgtcgtgtcatgttgtatcaccagggttgttacgcaggtggaaccgtacttaggacagctaaagatttggctgaaaataatgctggcgcaagagttttagttgtctgctcagagattaccgtcgtcacatttagaggtccttcagaagacgctttagacagcttagtcggacaggcgctatttggagatgggtccgctgccgttatcgttggttccgatcctgatgttagtatagaaagaccactgtttcaattagtctccgccgcacagacatttattccaaattctgctggtgctattgctggaaatttgcgtgaagttggcttaacatttcatctatggccaaatgtaccaactttaatatctgagaatatagaaaaatgtcttactcaagcatttgatccacttggtatttcagattggaactcattattctggatagctcatcctgggggtcccgctattttggatgccgttgaagctaaacttaatctagataaaaggaatttaaaacaacaggatatgtaactcgagcatgcatctagagggccgcatcatgtaattagttatgtcacgcttacattcacgccctccccccacatccgctctaaccgaaaaggaaggagttagacaacctgaagtctaggtccctatttatttttttatagttatgttagtattaagaacgttatttatatttcaaatttttcttttttttctgtacagacgcgtgtacgcatgtaacattatactgaaaaccttgcttgagaaggttttgggacgctcgaaggctttaatttgcggccctgcattaatgaatcggccaacgcgcggggagaggcggtttgcgtattgggcgctcttccgcttcctcgctcactgactcgctgcgctcggtcgttcggctgcggcgagcggtatcagctcactcaaaggcggtaatacggttatccacagaatcaggggataacgcaggaaagaacatgtgagcaaaaggccagcaaaagcccaggaaccgtaaaaaggccgcgttgctggcgtttttccataggctccgcccccctgacgagcatcacaaaaatcgacgctcaagtcagaggtggcgaaacccgacaggactataaagataccaggcgtttccccctggaagctccctcgtgcgctctcctgttccgaccctgccgcttaccggatacctgtccgcctttctcccttcgggaagcgtggcgctttctcatagctcacgctgtaggtatctcagttcggtgtaggtcgttcgctccaagctgggctgtgtgcacgaaccccccgttcagcccgaccgctgcgccttatccggtaactatcgtcttgagtccaacccggtaagacacgacttatcgccactggcagcagccactggtaacaggattagcagagcgaggtatgtaggcggtgctacagagttcttgaagtggtggcctaactacggctacactagaaggacagtatttggtatctgcgctctgctgaagccagttaccttcggaaaaagagttggtagctcttgatccggcaaacaaaccaccgctggtagcggtggtttttttgtttgcaagcagcagattacgcgcagaaaaaaaggatctcaagaagatcctttgatcttttctacggggtctgacgctcagtggaacgaaaactcacgttaagggattttggtcatgagattatcaaaaaggatcttcacctagatccttttaaattaaaaatgaagttttaaatcaatctaaagtatatatgagtaaacttggtctgacagttaccaatgcttaatcagtgaggcacctatctcagcgatctgtctatttcgttcatccatagttgcctgactccccgtcgtgtagataactacgatacgggagcgcttaccatctggccccagtgctgcaatgataccgcgagacccacgctcaccggctccagatttatcagcaataaaccagccagccggaagggccgagcgcagaagtggtcctgcaactttatccgcctccattcagtctattaattgttgccgggaagctagagtaagtagttcgccagttaatagtttgcgcaacgttgttggcattgctacaggcatcgtggtgtcactctcgtcgtttggtatggcttcattcagctccggttcccaacgatcaaggcgagttacatgatcccccatgttgtgcaaaaaagcggttagctccttcggtcctccgatcgttgtcagaagtaagttggccgcagtgttatcactcatggttatggcagcactgcataattctcttactgtcatgccatccgtaagatgcttttctgtgactggtgagtactcaaccaagtcattctgagaatagtgtatgcggcgaccgagttgctcttgcccggcgtcaatacgggataatagtgtatcacatagcagaactttaaaagtgctcatcattggaaaacgttcttcggggcgaaaactctcaaggatcttaccgctgttgagatccagttcgatgtaacccactcgtgcacccaactgatcttcagcatcttttactttcaccagcgtttctgggtgagcaaaaacaggaaggcaaaatgccgcaaaaaagggaataagggcgacacggaaatgttgaatactcatactcttcctttttcaatgggtaataactgatataattaaattgaagctctaatttgtgagtttagtatacatgcatttacttataatacagttttttagttttgctggccgcatcttctcaaatatgcttcccagcctgcttttctgtaacgttcaccctctaccttagcatcccttccctttgcaaatagtcctcttccaacaataataatgtcagatcctgtagagaccacatcatccacggttctatactgttgacccaatgcgtctcccttgtcatctaaacccacaccgggtgtcataatcaaccaatcgtaaccttcatctcttccacccatgtctctttgagcaataaagccgataacaaaatctttgtcgctcttcgcaatgtcaacagtacccttagtatattctccagtagatagggagcccttgcatgacaattctgctaacatcaaaaggcctctaggttcctttgttacttcttctgccgcctgcttcaaaccgctaacaatacctgggcccaccacaccgtgtgcattcgtaatgtctgcccattctgctattctgtatacacccgcagagtactgcaatttgactgtattaccaatgtcagcaaattttctgtcttcg

SEQ ID NO: 390 - DNA, 6904 bp, Artificial Sequence
  PLAS489
aagagtaaaaaattgtacttggcggataatgcctttagcggcttaactgtgccctccatggaaaaatcagtcaagatatccacatgtgtttttagtaaacaaattttgggacctaatgcttcaactaactccagtaattccttggtggtacgaacatccaatgaagcacacaagtttgtttgcttttcgtgcatgatattaaatagcttggcagcaacaggactaggatgagtagcagcacgttccttatatgtagctttcgacatgatttatcttcgtttcctgcaggtttttgttctgtgcagttgggttaagaatactgggcaatttcatgtttcttcaacactacatatgcgtatatataccaatctaagtctgtgctccttccttcgttcttccttctgttcggagattaccgaatcaaaaaaatttcaaagaaaccgaaatcaaaaaaaagaataaaaaaaaaatgatgaattgaattgaaaagctagcttatcgatgataagctgtcaaagatgagaattaattccacggactatagactatactagatactccgtctactgtacgatacacttccgctcaggtccttgtcctttaacgaggccttaccactcttttgttactctattgatccagctcagcaaaggcagtgtgatctaagattctatcttcgcgatgtagtaaaactagctagaccgagaaagagactagaaatgcaaaaggcacttctacaatggctgccatcattattatccgatgtgacgctgcagcttctcaatgatattcgaatacgctttgaggagatacagcctaatatccgacaaactgttttacagatttacgatcgtacttgttacccatcattgaattttgaacatccgaacctgggagttttccctgaaacagatagtatatttgaacctgtataataatatatagtctagcgctttacggaagacaatgtatgtatttcggttcctggagaaactattgcatctattgcataggtaatcttgcacgtcgcatccccggttcattttctgcgtttccatcttgcacttcaatagcatatctttgttaacgaagcatctgtgcttcattttgtagaacaaaaatgcaacgcgagagcgctaatttttcaaacaaagaatctgagctgcatttttacagaacagaaatgcaacgcgaaagcgctattttaccaacgaagaatctgtgcttcatttttgtaaaacaaaaatgcaacgcgacgagagcgctaatttttcaaacaaagaatctgagctgcatttttacagaacagaaatgcaacgcgagagcgctattttaccaacaaagaatctatacttcttttttgttctacaaaaatgcatcccgagagcgctatttttctaacaaagcatcttagattactttttttctcctttgtgcgctctataatgcagtctcttgataactttttgcactgtaggtccgttaaggttagaagaaggctactttggtgtctattttctcttccataaaaaaagcctgactccacttcccgcgtttactgattactagcgaagctgcgggtgcattttttcaagataaaggcatccccgattatattctataccgatgtggattgcgcatactttgtgaacagaaagtgatagcgttgatgattcttcattggtcagaaaattatgaacggtttcttctattttgtctctatatactacgtataggaaatgtttacattttcgtattgttttcgattcactctatgaatagttcttactacaatttttttgtctaaagagtaatactagagataaacataaaaaatgtagaggtcgagtttagatgcaagttcaaggagcgaaaggtggatgggtaggttatatagggatatagcacagagatatatagcaaagagatacttttgagcaatgtttgtggaagcggtattcgcaatgggaagctccaccccggttgataatcagaaaagccccaaaaacaggaagattgtataagcaaatatttaaattgtaaacgttaatattttgttaaaattcgcgttaaatttttgttaaatcagctcattttttaacgaatagcccgaaatcggcaaaatcccttataaatcaaaagaatagaccgagatagggttgagtgttgttccagtttccaacaagagtccactattaaagaacgtggactccaacgtcaaagggcgaaaaagggtctatcagggcgatggcccactacgtgaaccatcaccctaatcaagttttttggggtcgaggtgccgtaaagcagtaaatcggaagggtaaacggatgcccccatttagagcttgacggggaaagccggcgaacgtggcgagaaaggaagggaagaaagcgaaaggagcgggggctagggcggtgggaagtgtaggggtcacgctgggcgtaaccaccacacccgccgcgcttaatggggcgctacagggcgcgtggggatgatccactagtacggattagaagccgccgagcgggtgacagccctccgaaggaagactctcctccgtgcgtcctcgtcttcaccggtcgcgttcctgaaacgcagatgtgcctcgcgccgcactgctccgaacaataaagattctacaatactagcttttatggttatgaagaggaaaaattggcagtaacctggccccacaaaccttcaaatgaacgaatcaaattaacaaccataggatgataatgcgattagttttttagccttatttctggggtaattaatcagcgaagcgatgatttttgatctattaacagatatataaatgcaaaaactgcataaccactttaactaatactttcaacattttcggtttgtattacttcttattcaaatgtaataaaagtatcaacaaaaaattgttaatatacctctatactttaacgtcaaggagaaaaaaccccggatcggactactagcagctgtaatacgactcactatagggaatattaagcttaaacaatggcaagtatcgaagaaataaggaatgctcagagggccaaggggcctgctacaatattagctataggtacagccacccccgatcattgtgtatatcagtctgattacgcagattattatttcagggtaacaaagtctgaacatatgactgaattgaagaaaaaatttaatagaatttgtgacaagagtatgattaaaaaaagatacatccatttgacagaggagatgttagaagaacacccaaacatcggtgcgtatatggctccatctttaaatatcaggcaagaaattataactgctgaagtaccaaaacttggtaaagaggctgccttgaaagctttgaaggaatggggtcagcccaaaagtaagattacccacctagtcttttgtacgacgtctggagttgaaatgcctggagctgactataaattggctaatctgcttggattggagacgtcagtcagaagagtcatgttatatcatcagggtgctagggtcttggtagtttgtagtgaaataactgtagtcacatttagaggccctagtgaagatgccctggattcactggtaggtcaggcattatttggtgatggcagcgcagcagttatagttggctcagatccggatgtctcaattgaacgtcctttatttcaattagtttcagcggctcaaacttttattccaaacagtgccggggctattgcgggaaatttgagagaggtcggtttgacatttcatttatggccaaatgtaccaactttaataagtgaaaatatcgaaaaatgtttgaatcaagcctttgatcctttgggtatttcggattggaattccttattttggattgcacatccaggcggtcctgctatactggacgcggtcgaagctaagttgaatctagaaaagaagaaattagaggcaacgagacatgtcctatccgaatatggaaatatgtcctccgcctgtgttttgtttattttagacgaaatgagaaagaaatccctgaaaggtgaaaaggcaactacaggcgaaggtttggattggggagttttgtttggattcggtcccggattgacaattgaaaccgttgttctacattctgtaccaatggtaacaaattaactcgagcatgcatctagagggccgcatcatgtaattagttatgtcacgcttacattcacgccctccccccacatccgctctaaccgaaaaggaaggagttagacaacctgaagtctaggtccctatttatttttttatagttatgttagtattaagaacgttatttatatttcaaatttttcttttttttctgtacagacgcgtgtacgcatgtaacattatactgaaaaccttgcttgagaaggttttgggacgctcgaaggctttaatttgcggccctgcattaatgaatcggccaacgcgcggggagaggcggtttgcgtattgggcgctcttccgcttcctcgctcactgactcgctgcgctcggtcgttcggctgcggcgagcggtatcagctcactcaaaggcggtaatacggttatccacagaatcaggggataacgcaggaaagaacatgtgagcaaaaggccagcaaaagcccaggaaccgtaaaaaggccgcgttgctggcgtttttccataggctccgcccccctgacgagcatcacaaaaatcgacgctcaagtcagaggtggcgaaacccgacaggactataaagataccaggcgtttccccctggaagctccctcgtgcgctctcctgttccgaccctgccgcttaccggatacctgtccgcctttctcccttcgggaagcgtggcgctttctcatagctcacgctgtaggtatctcagttcggtgtaggtcgttcgctccaagctgggctgtgtgcacgaaccccccgttcagcccgaccgctgcgccttatccggtaactatcgtcttgagtccaacccggtaagacacgacttatcgccactggcagcagccactggtaacaggattagcagagcgaggtatgtaggcggtgctacagagttcttgaagtggtggcctaactacggctacactagaaggacagtatttggtatctgcgctctgctgaagccagttaccttcggaaaaagagttggtagctcttgatccggcaaacaaaccaccgctggtagcggtggtttttttgtttgcaagcagcagattacgcgcagaaaaaaaggatctcaagaagatcctttgatcttttctacggggtctgacgctcagtggaacgaaaactcacgttaagggattttggtcatgagattatcaaaaaggatcttcacctagatccttttaaattaaaaatgaagttttaaatcaatctaaagtatatatgagtaaacttggtctgacagttaccaatgcttaatcagtgaggcacctatctcagcgatctgtctatttcgttcatccatagttgcctgactccccgtcgtgtagataactacgatacgggagcgcttaccatctggccccagtgctgcaatgataccgcgagacccacgctcaccggctccagatttatcagcaataaaccagccagccggaagggccgagcgcagaagtggtcctgcaactttatccgcctccattcagtctattaattgttgccgggaagctagagtaagtagttcgccagttaatagtttgcgcaacgttgttggcattgctacaggcatcgtggtgtcactctcgtcgtttggtatggcttcattcagctccggttcccaacgatcaaggcgagttacatgatcccccatgttgtgcaaaaaagcggttagctccttcggtcctccgatcgttgtcagaagtaagttggccgcagtgttatcactcatggttatggcagcactgcataattctcttactgtcatgccatccgtaagatgcttttctgtgactggtgagtactcaaccaagtcattctgagaatagtgtatgcggcgaccgagttgctcttgcccggcgtcaatacgggataatagtgtatcacatagcagaactttaaaagtgctcatcattggaaaacgttcttcggggcgaaaactctcaaggatcttaccgctgttgagatccagttcgatgtaacccactcgtgcacccaactgatcttcagcatcttttactttcaccagcgtttctgggtgagcaaaaacaggaaggcaaaatgccgcaaaaaagggaataagggcgacacggaaatgttgaatactcatactcttcctttttcaatgggtaataactgatataattaaattgaagctctaatttgtgagtttagtatacatgcatttacttataatacagttttttagttttgctggccgcatcttctcaaatatgcttcccagcctgcttttctgtaacgttcaccctctaccttagcatcccttccctttgcaaatagtcctcttccaacaataataatgtcagatcctgtagagaccacatcatccacggttctatactgttgacccaatgcgtctcccttgtcatctaaacccacaccgggtgtcataatcaaccaatcgtaaccttcatctcttccacccatgtctctttgagcaataaagccgataacaaaatctttgtcgctcttcgcaatgtcaacagtacccttagtatattctccagtagatagggagcccttgcatgacaattctgctaacatcaaaaggcctctaggttcctttgttacttcttctgccgcctgcttcaaaccgctaacaatacctgggcccaccacaccgtgtgcattcgtaatgtctgcccattctgctattctgtatacacccgcagagtactgcaatttgactgtattaccaatgtcagcaaattttctgtcttcg

SEQ ID NO: 391 - DNA, 6883 bp, Artificial Sequence
  PLAS490
aagagtaaaaaattgtacttggcggataatgcctttagcggcttaactgtgccctccatggaaaaatcagtcaagatatccacatgtgtttttagtaaacaaattttgggacctaatgcttcaactaactccagtaattccttggtggtacgaacatccaatgaagcacacaagtttgtttgcttttcgtgcatgatattaaatagcttggcagcaacaggactaggatgagtagcagcacgttccttatatgtagctttcgacatgatttatcttcgtttcctgcaggtttttgttctgtgcagttgggttaagaatactgggcaatttcatgtttcttcaacactacatatgcgtatatataccaatctaagtctgtgctccttccttcgttcttccttctgttcggagattaccgaatcaaaaaaatttcaaagaaaccgaaatcaaaaaaaagaataaaaaaaaaatgatgaattgaattgaaaagctagcttatcgatgataagctgtcaaagatgagaattaattccacggactatagactatactagatactccgtctactgtacgatacacttccgctcaggtccttgtcctttaacgaggccttaccactcttttgttactctattgatccagctcagcaaaggcagtgtgatctaagattctatcttcgcgatgtagtaaaactagctagaccgagaaagagactagaaatgcaaaaggcacttctacaatggctgccatcattattatccgatgtgacgctgcagcttctcaatgatattcgaatacgctttgaggagatacagcctaatatccgacaaactgttttacagatttacgatcgtacttgttacccatcattgaattttgaacatccgaacctgggagttttccctgaaacagatagtatatttgaacctgtataataatatatagtctagcgctttacggaagacaatgtatgtatttcggttcctggagaaactattgcatctattgcataggtaatcttgcacgtcgcatccccggttcattttctgcgtttccatcttgcacttcaatagcatatctttgttaacgaagcatctgtgcttcattttgtagaacaaaaatgcaacgcgagagcgctaatttttcaaacaaagaatctgagctgcatttttacagaacagaaatgcaacgcgaaagcgctattttaccaacgaagaatctgtgcttcatttttgtaaaacaaaaatgcaacgcgacgagagcgctaatttttcaaacaaagaatctgagctgcatttttacagaacagaaatgcaacgcgagagcgctattttaccaacaaagaatctatacttcttttttgttctacaaaaatgcatcccgagagcgctatttttctaacaaagcatcttagattactttttttctcctttgtgcgctctataatgcagtctcttgataactttttgcactgtaggtccgttaaggttagaagaaggctactttggtgtctattttctcttccataaaaaaagcctgactccacttcccgcgtttactgattactagcgaagctgcgggtgcattttttcaagataaaggcatccccgattatattctataccgatgtggattgcgcatactttgtgaacagaaagtgatagcgttgatgattcttcattggtcagaaaattatgaacggtttcttctattttgtctctatatactacgtataggaaatgtttacattttcgtattgttttcgattcactctatgaatagttcttactacaatttttttgtctaaagagtaatactagagataaacataaaaaatgtagaggtcgagtttagatgcaagttcaaggagcgaaaggtggatgggtaggttatatagggatatagcacagagatatatagcaaagagatacttttgagcaatgtttgtggaagcggtattcgcaatgggaagctccaccccggttgataatcagaaaagccccaaaaacaggaagattgtataagcaaatatttaaattgtaaacgttaatattttgttaaaattcgcgttaaatttttgttaaatcagctcattttttaacgaatagcccgaaatcggcaaaatcccttataaatcaaaagaatagaccgagatagggttgagtgttgttccagtttccaacaagagtccactattaaagaacgtggactccaacgtcaaagggcgaaaaagggtctatcagggcgatggcccactacgtgaaccatcaccctaatcaagttttttggggtcgaggtgccgtaaagcagtaaatcggaagggtaaacggatgcccccatttagagcttgacggggaaagccggcgaacgtggcgagaaaggaagggaagaaagcgaaaggagcgggggctagggcggtgggaagtgtaggggtcacgctgggcgtaaccaccacacccgccgcgcttaatggggcgctacagggcgcgtggggatgatccactagtacggattagaagccgccgagcgggtgacagccctccgaaggaagactctcctccgtgcgtcctcgtcttcaccggtcgcgttcctgaaacgcagatgtgcctcgcgccgcactgctccgaacaataaagattctacaatactagcttttatggttatgaagaggaaaaattggcagtaacctggccccacaaaccttcaaatgaacgaatcaaattaacaaccataggatgataatgcgattagttttttagccttatttctggggtaattaatcagcgaagcgatgatttttgatctattaacagatatataaatgcaaaaactgcataaccactttaactaatactttcaacattttcggtttgtattacttcttattcaaatgtaataaaagtatcaacaaaaaattgttaatatacctctatactttaacgtcaaggagaaaaaaccccggatcggactactagcagctgtaatacgactcactatagggaatattaagcttaaacaatggcttcagttgaggaatttaggaacgcacaaagagctaaagggccagcaactatactggcgataggaacggcgactccagaccactgcgtctatcaaagcgactatgcagactattatttcagagtgaccaagtctgaacacatgacagaattgaagaagaagtttaacaggatctgtgacaaatccatgattaagaaggcttacatccatttgaccgaggagatgcttgaggagcacccaaacatcggggcctacatggctccctcattgaacataagacaggagattatcactgcggaagtacccaagctgggcaaagaggcagcccttaaggctcttaaagagtggggacagcctaagtctaagattacgcatctagttttctgcacaacatccggtgtcgaaatgccaggggcggactacaaattagccaacctactgggactagagacctctgtccgtagagtgatgttgtatcaccagggttgctacgctggtggcacagtacttaggaccgcgaaggacttagcagagaacaatgccggcgctagggtgcttgttgtgtgttcagaaataacagttgtgacgttcagaggtccttcggaagcagccttggactcgcttgttggccaggcactattcgcccagacgttcattcctaactcagcaggtgctatagcggggaacttgcgtgaggttgggcttacattccacttatggccgaatgtgccaacgttgatatcagagaatatagagaaatgtttaacacaggcatttgacccattaggtatctcagactggaatagcttattttggatagcgcacccgggcggtcctgccatattggacgcagttgaggccaaattgaacttagagaagaagaagctggaagcaactagacacgtactttcggagtatggtaatatgagctcggcatgcgtcctattcatattggacgagatgcgtaagaagtccttaaaaggagccaaagctacaaccggcgagggtctagactggggagtcctgtttgggtttggacctggcctaaccatcgagactgtcgtcttgcattcgattcctacagtgaccaattaactcgagcatgcatctagagggccgcatcatgtaattagttatgtcacgcttacattcacgccctccccccacatccgctctaaccgaaaaggaaggagttagacaacctgaagtctaggtccctatttatttttttatagttatgttagtattaagaacgttatttatatttcaaatttttcttttttttctgtacagacgcgtgtacgcatgtaacattatactgaaaaccttgcttgagaaggttttgggacgctcgaaggctttaatttgcggccctgcattaatgaatcggccaacgcgcggggagaggcggtttgcgtattgggcgctcttccgcttcctcgctcactgactcgctgcgctcggtcgttcggctgcggcgagcggtatcagctcactcaaaggcggtaatacggttatccacagaatcaggggataacgcaggaaagaacatgtgagcaaaaggccagcaaaagcccaggaaccgtaaaaaggccgcgttgctggcgtttttccataggctccgcccccctgacgagcatcacaaaaatcgacgctcaagtcagaggtggcgaaacccgacaggactataaagataccaggcgtttccccctggaagctccctcgtgcgctctcctgttccgaccctgccgcttaccggatacctgtccgcctttctcccttcgggaagcgtggcgctttctcatagctcacgctgtaggtatctcagttcggtgtaggtcgttcgctccaagctgggctgtgtgcacgaaccccccgttcagcccgaccgctgcgccttatccggtaactatcgtcttgagtccaacccggtaagacacgacttatcgccactggcagcagccactggtaacaggattagcagagcgaggtatgtaggcggtgctacagagttcttgaagtggtggcctaactacggctacactagaaggacagtatttggtatctgcgctctgctgaagccagttaccttcggaaaaagagttggtagctcttgatccggcaaacaaaccaccgctggtagcggtggtttttttgtttgcaagcagcagattacgcgcagaaaaaaaggatctcaagaagatcctttgatcttttctacggggtctgacgctcagtggaacgaaaactcacgttaagggattttggtcatgagattatcaaaaaggatcttcacctagatccttttaaattaaaaatgaagttttaaatcaatctaaagtatatatgagtaaacttggtctgacagttaccaatgcttaatcagtgaggcacctatctcagcgatctgtctatttcgttcatccatagttgcctgactccccgtcgtgtagataactacgatacgggagcgcttaccatctggccccagtgctgcaatgataccgcgagacccacgctcaccggctccagatttatcagcaataaaccagccagccggaagggccgagcgcagaagtggtcctgcaactttatccgcctccattcagtctattaattgttgccgggaagctagagtaagtagttcgccagttaatagtttgcgcaacgttgttggcattgctacaggcatcgtggtgtcactctcgtcgtttggtatggcttcattcagctccggttcccaacgatcaaggcgagttacatgatcccccatgttgtgcaaaaaagcggttagctccttcggtcctccgatcgttgtcagaagtaagttggccgcagtgttatcactcatggttatggcagcactgcataattctcttactgtcatgccatccgtaagatgcttttctgtgactggtgagtactcaaccaagtcattctgagaatagtgtatgcggcgaccgagttgctcttgcccggcgtcaatacgggataatagtgtatcacatagcagaactttaaaagtgctcatcattggaaaacgttcttcggggcgaaaactctcaaggatcttaccgctgttgagatccagttcgatgtaacccactcgtgcacccaactgatcttcagcatcttttactttcaccagcgtttctgggtgagcaaaaacaggaaggcaaaatgccgcaaaaaagggaataagggcgacacggaaatgttgaatactcatactcttcctttttcaatgggtaataactgatataattaaattgaagctctaatttgtgagtttagtatacatgcatttacttataatacagttttttagttttgctggccgcatcttctcaaatatgcttcccagcctgcttttctgtaacgttcaccctctaccttagcatcccttccctttgcaaatagtcctcttccaacaataataatgtcagatcctgtagagaccacatcatccacggttctatactgttgacccaatgcgtctcccttgtcatctaaacccacaccgggtgtcataatcaaccaatcgtaaccttcatctcttccacccatgtctctttgagcaataaagccgataacaaaatctttgtcgctcttcgcaatgtcaacagtacccttagtatattctccagtagatagggagcccttgcatgacaattctgctaacatcaaaaggcctctaggttcctttgttacttcttctgccgcctgcttcaaaccgctaacaatacctgggcccaccacaccgtgtgcattcgtaatgtctgcccattctgctattctgtatacacccgcagagtactgcaatttgactgtattaccaatgtcagcaaattttctgtcttcg

SEQ ID NO: 392 - DNA, 6964 bp, Artificial Sequence
  PLAS491
aagagtaaaaaattgtacttggcggataatgcctttagcggcttaactgtgccctccatggaaaaatcagtcaagatatccacatgtgtttttagtaaacaaattttgggacctaatgcttcaactaactccagtaattccttggtggtacgaacatccaatgaagcacacaagtttgtttgcttttcgtgcatgatattaaatagcttggcagcaacaggactaggatgagtagcagcacgttccttatatgtagctttcgacatgatttatcttcgtttcctgcaggtttttgttctgtgcagttgggttaagaatactgggcaatttcatgtttcttcaacactacatatgcgtatatataccaatctaagtctgtgctccttccttcgttcttccttctgttcggagattaccgaatcaaaaaaatttcaaagaaaccgaaatcaaaaaaaagaataaaaaaaaaatgatgaattgaattgaaaagctagcttatcgatgataagctgtcaaagatgagaattaattccacggactatagactatactagatactccgtctactgtacgatacacttccgctcaggtccttgtcctttaacgaggccttaccactcttttgttactctattgatccagctcagcaaaggcagtgtgatctaagattctatcttcgcgatgtagtaaaactagctagaccgagaaagagactagaaatgcaaaaggcacttctacaatggctgccatcattattatccgatgtgacgctgcagcttctcaatgatattcgaatacgctttgaggagatacagcctaatatccgacaaactgttttacagatttacgatcgtacttgttacccatcattgaattttgaacatccgaacctgggagttttccctgaaacagatagtatatttgaacctgtataataatatatagtctagcgctttacggaagacaatgtatgtatttcggttcctggagaaactattgcatctattgcataggtaatcttgcacgtcgcatccccggttcattttctgcgtttccatcttgcacttcaatagcatatctttgttaacgaagcatctgtgcttcattttgtagaacaaaaatgcaacgcgagagcgctaatttttcaaacaaagaatctgagctgcatttttacagaacagaaatgcaacgcgaaagcgctattttaccaacgaagaatctgtgcttcatttttgtaaaacaaaaatgcaacgcgacgagagcgctaatttttcaaacaaagaatctgagctgcatttttacagaacagaaatgcaacgcgagagcgctattttaccaacaaagaatctatacttcttttttgttctacaaaaatgcatcccgagagcgctatttttctaacaaagcatcttagattactttttttctcctttgtgcgctctataatgcagtctcttgataactttttgcactgtaggtccgttaaggttagaagaaggctactttggtgtctattttctcttccataaaaaaagcctgactccacttcccgcgtttactgattactagcgaagctgcgggtgcattttttcaagataaaggcatccccgattatattctataccgatgtggattgcgcatactttgtgaacagaaagtgatagcgttgatgattcttcattggtcagaaaattatgaacggtttcttctattttgtctctatatactacgtataggaaatgtttacattttcgtattgttttcgattcactctatgaatagttcttactacaatttttttgtctaaagagtaatactagagataaacataaaaaatgtagaggtcgagtttagatgcaagttcaaggagcgaaaggtggatgggtaggttatatagggatatagcacagagatatatagcaaagagatacttttgagcaatgtttgtggaagcggtattcgcaatgggaagctccaccccggttgataatcagaaaagccccaaaaacaggaagattgtataagcaaatatttaaattgtaaacgttaatattttgttaaaattcgcgttaaatttttgttaaatcagctcattttttaacgaatagcccgaaatcggcaaaatcccttataaatcaaaagaatagaccgagatagggttgagtgttgttccagtttccaacaagagtccactattaaagaacgtggactccaacgtcaaagggcgaaaaagggtctatcagggcgatggcccactacgtgaaccatcaccctaatcaagttttttggggtcgaggtgccgtaaagcagtaaatcggaagggtaaacggatgcccccatttagagcttgacggggaaagccggcgaacgtggcgagaaaggaagggaagaaagcgaaaggagcgggggctagggcggtgggaagtgtaggggtcacgctgggcgtaaccaccacacccgccgcgcttaatggggcgctacagggcgcgtggggatgatccactagtacggattagaagccgccgagcgggtgacagccctccgaaggaagactctcctccgtgcgtcctcgtcttcaccggtcgcgttcctgaaacgcagatgtgcctcgcgccgcactgctccgaacaataaagattctacaatactagcttttatggttatgaagaggaaaaattggcagtaacctggccccacaaaccttcaaatgaacgaatcaaattaacaaccataggatgataatgcgattagttttttagccttatttctggggtaattaatcagcgaagcgatgatttttgatctattaacagatatataaatgcaaaaactgcataaccactttaactaatactttcaacattttcggtttgtattacttcttattcaaatgtaataaaagtatcaacaaaaaattgttaatatacctctatactttaacgtcaaggagaaaaaaccccggatcggactactagcagctgtaatacgactcactatagggaatattaagcttaaacaatggcttctgttgaggagtttaggaacgcccaaagagctaaggggccagccaccatacttactattgggactgccactcccgatcattgtatttatcaatccgattatgccgattattacttcagagtgaccaaatccgaacacatgacagaattaaagaaaaaatttaataggatctgtgagaagtctatgatcaagaaaagatacatccatcttacggaagaaatgttagaagaacacccaaacataggtgcttatatggctccctctctgaatattagacaagagattatcacagctgaggttcctagattgggtagagacgctgccttgaaggccctgaaagaatgggggcagcctaaatctaagataacccatttggtgttttgtacaacttcaggtgtcgagatgccgggcgccgattataagttggcaaacttacttggcttagaaacatctgtaaggagagttatgctgtatcatcagggttgttacgcgggaggtactgtgctgagggcggctaaggatttagcagagaacaatacgggtgcaagggtcctagttgtctgttccgaaataacagttgttacattcaggggtcctagcgaggacgcgttggattcattggttggacaggcattgttcggagatggttcttcagcagtaattgtgggctcggaccctgatgtttccatcgaaagaccactattccagttggtgagcgcagctcaaacctttattccgaactcggccggtgccatcgcaggaaacctgagggaagtgggcttaacatttcatctgtggccgaacgtcccaacattgatcagtgaaaatattgaaaaatgtttgacacaagctttcgatcccttgggtatttcggattggaactccttattttggattgcgcatcctggaggaccagctatactggataccgtagaggcgaagctaaatttggaaaagaagaaattagaagctacccgtcatgttctatccgaatacggaaatatgtcttccgcatgtgttctgtttattttggatgagatgcgtaaaaaatccttaaaaggtgagaatgcaactactggtgaggggctggactggggcgtgttgtttggcttcggtccagggttaacaattgaaacagttgtgctacactctattccgactgttaccaactgactcgagcatgcatctagagggccgcatcatgtaattagttatgtcacgcttacattcacgccctccccccacatccgctctaaccgaaaaggaaggagttagacaacctgaagtctaggtccctatttatttttttatagttatgttagtattaagaacgttatttatatttcaaatttttcttttttttctgtacagacgcgtgtacgcatgtaacattatactgaaaaccttgcttgagaaggttttgggacgctcgaaggctttaatttgcggccctgcattaatgaatcggccaacgcgcggggagaggcggtttgcgtattgggcgctcttccgcttcctcgctcactgactcgctgcgctcggtcgttcggctgcggcgagcggtatcagctcactcaaaggcggtaatacggttatccacagaatcaggggataacgcaggaaagaacatgtgagcaaaaggccagcaaaagcccaggaaccgtaaaaaggccgcgttgctggcgtttttccataggctccgcccccctgacgagcatcacaaaaatcgacgctcaagtcagaggtggcgaaacccgacaggactataaagataccaggcgtttccccctggaagctccctcgtgcgctctcctgttccgaccctgccgcttaccggatacctgtccgcctttctcccttcgggaagcgtggcgctttctcatagctcacgctgtaggtatctcagttcggtgtaggtcgttcgctccaagctgggctgtgtgcacgaaccccccgttcagcccgaccgctgcgccttatccggtaactatcgtcttgagtccaacccggtaagacacgacttatcgccactggcagcagccactggtaacaggattagcagagcgaggtatgtaggcggtgctacagagttcttgaagtggtggcctaactacggctacactagaaggacagtatttggtatctgcgctctgctgaagccagttaccttcggaaaaagagttggtagctcttgatccggcaaacaaaccaccgctggtagcggtggtttttttgtttgcaagcagcagattacgcgcagaaaaaaaggatctcaagaagatcctttgatcttttctacggggtctgacgctcagtggaacgaaaactcacgttaagggattttggtcatgagattatcaaaaaggatcttcacctagatccttttaaattaaaaatgaagttttaaatcaatctaaagtatatatgagtaaacttggtctgacagttaccaatgcttaatcagtgaggcacctatctcagcgatctgtctatttcgttcatccatagttgcctgactccccgtcgtgtagataactacgatacgggagcgcttaccatctggccccagtgctgcaatgataccgcgagacccacgctcaccggctccagatttatcagcaataaaccagccagccggaagggccgagcgcagaagtggtcctgcaactttatccgcctccattcagtctattaattgttgccgggaagctagagtaagtagttcgccagttaatagtttgcgcaacgttgttggcattgctacaggcatcgtggtgtcactctcgtcgtttggtatggcttcattcagctccggttcccaacgatcaaggcgagttacatgatcccccatgttgtgcaaaaaagcggttagctccttcggtcctccgatcgttgtcagaagtaagttggccgcagtgttatcactcatggttatggcagcactgcataattctcttactgtcatgccatccgtaagatgcttttctgtgactggtgagtactcaaccaagtcattctgagaatagtgtatgcggcgaccgagttgctcttgcccggcgtcaatacgggataatagtgtatcacatagcagaactttaaaagtgctcatcattggaaaacgttcttcggggcgaaaactctcaaggatcttaccgctgttgagatccagttcgatgtaacccactcgtgcacccaactgatcttcagcatcttttactttcaccagcgtttctgggtgagcaaaaacaggaaggcaaaatgccgcaaaaaagggaataagggcgacacggaaatgttgaatactcatactcttcctttttcaatgggtaataactgatataattaaattgaagctctaatttgtgagtttagtatacatgcatttacttataatacagttttttagttttgctggccgcatcttctcaaatatgcttcccagcctgcttttctgtaacgttcaccctctaccttagcatcccttccctttgcaaatagtcctcttccaacaataataatgtcagatcctgtagagaccacatcatccacggttctatactgttgacccaatgcgtctcccttgtcatctaaacccacaccgggtgtcataatcaaccaatcgtaaccttcatctcttccacccatgtctctttgagcaataaagccgataacaaaatctttgtcgctcttcgcaatgtcaacagtacccttagtatattctccagtagatagggagcccttgcatgacaattctgctaacatcaaaaggcctctaggttcctttgttacttcttctgccgcctgcttcaaaccgctaacaatacctgggcccaccacaccgtgtgcattcgtaatgtctgcccattctgctattctgtatacacccgcagagtactgcaatttgactgtattaccaatgtcagcaaattttctgtcttcg

SEQ ID NO: 393 - DNA, 6886 bp, Artificial Sequence
  PLAS492
aagagtaaaaaattgtacttggcggataatgcctttagcggcttaactgtgccctccatggaaaaatcagtcaagatatccacatgtgtttttagtaaacaaattttgggacctaatgcttcaactaactccagtaattccttggtggtacgaacatccaatgaagcacacaagtttgtttgcttttcgtgcatgatattaaatagcttggcagcaacaggactaggatgagtagcagcacgttccttatatgtagctttcgacatgatttatcttcgtttcctgcaggtttttgttctgtgcagttgggttaagaatactgggcaatttcatgtttcttcaacactacatatgcgtatatataccaatctaagtctgtgctccttccttcgttcttccttctgttcggagattaccgaatcaaaaaaatttcaaagaaaccgaaatcaaaaaaaagaataaaaaaaaaatgatgaattgaattgaaaagctagcttatcgatgataagctgtcaaagatgagaattaattccacggactatagactatactagatactccgtctactgtacgatacacttccgctcaggtccttgtcctttaacgaggccttaccactcttttgttactctattgatccagctcagcaaaggcagtgtgatctaagattctatcttcgcgatgtagtaaaactagctagaccgagaaagagactagaaatgcaaaaggcacttctacaatggctgccatcattattatccgatgtgacgctgcagcttctcaatgatattcgaatacgctttgaggagatacagcctaatatccgacaaactgttttacagatttacgatcgtacttgttacccatcattgaattttgaacatccgaacctgggagttttccctgaaacagatagtatatttgaacctgtataataatatatagtctagcgctttacggaagacaatgtatgtatttcggttcctggagaaactattgcatctattgcataggtaatcttgcacgtcgcatccccggttcattttctgcgtttccatcttgcacttcaatagcatatctttgttaacgaagcatctgtgcttcattttgtagaacaaaaatgcaacgcgagagcgctaatttttcaaacaaagaatctgagctgcatttttacagaacagaaatgcaacgcgaaagcgctattttaccaacgaagaatctgtgcttcatttttgtaaaacaaaaatgcaacgcgacgagagcgctaatttttcaaacaaagaatctgagctgcatttttacagaacagaaatgcaacgcgagagcgctattttaccaacaaagaatctatacttcttttttgttctacaaaaatgcatcccgagagcgctatttttctaacaaagcatcttagattactttttttctcctttgtgcgctctataatgcagtctcttgataactttttgcactgtaggtccgttaaggttagaagaaggctactttggtgtctattttctcttccataaaaaaagcctgactccacttcccgcgtttactgattactagcgaagctgcgggtgcattttttcaagataaaggcatccccgattatattctataccgatgtggattgcgcatactttgtgaacagaaagtgatagcgttgatgattcttcattggtcagaaaattatgaacggtttcttctattttgtctctatatactacgtataggaaatgtttacattttcgtattgttttcgattcactctatgaatagttcttactacaatttttttgtctaaagagtaatactagagataaacataaaaaatgtagaggtcgagtttagatgcaagttcaaggagcgaaaggtggatgggtaggttatatagggatatagcacagagatatatagcaaagagatacttttgagcaatgtttgtggaagcggtattcgcaatgggaagctccaccccggttgataatcagaaaagccccaaaaacaggaagattgtataagcaaatatttaaattgtaaacgttaatattttgttaaaattcgcgttaaatttttgttaaatcagctcattttttaacgaatagcccgaaatcggcaaaatcccttataaatcaaaagaatagaccgagatagggttgagtgttgttccagtttccaacaagagtccactattaaagaacgtggactccaacgtcaaagggcgaaaaagggtctatcagggcgatggcccactacgtgaaccatcaccctaatcaagttttttggggtcgaggtgccgtaaagcagtaaatcggaagggtaaacggatgcccccatttagagcttgacggggaaagccggcgaacgtggcgagaaaggaagggaagaaagcgaaaggagcgggggctagggcggtgggaagtgtaggggtcacgctgggcgtaaccaccacacccgccgcgcttaatggggcgctacagggcgcgtggggatgatccactagtacggattagaagccgccgagcgggtgacagccctccgaaggaagactctcctccgtgcgtcctcgtcttcaccggtcgcgttcctgaaacgcagatgtgcctcgcgccgcactgctccgaacaataaagattctacaatactagcttttatggttatgaagaggaaaaattggcagtaacctggccccacaaaccttcaaatgaacgaatcaaattaacaaccataggatgataatgcgattagttttttagccttatttctggggtaattaatcagcgaagcgatgatttttgatctattaacagatatataaatgcaaaaactgcataaccactttaactaatactttcaacattttcggtttgtattacttcttattcaaatgtaataaaagtatcaacaaaaaattgttaatatacctctatactttaacgtcaaggagaaaaaaccccggatcggactactagcagctgtaatacgactcactatagggaatattaagcttaaacaatggcctctgtggaagatattagaaatgctcaacatgcaaagcgtttagcaactatcttagttattggtacggcaactccagacaattacgcttaccagtccgattacgcagattattacttcagagttacaaagtctgaacatatgacagacttaaagaaaaagttcaatagaatttgcgagaagagcatgataaagaagagatacatccatcttaccgaggaaatgctagaggaacatcctaacatgggcgcatatatggccccaagtctgaacataagacaggaaataattactaccgaagtgccaaaattgggcaaagaagcaactcttaaagccttgaaagaatggggacaacccaaaagtaagataacacatttggtcttttgtactacgtcgggcgtcgagatgcctggagcagactataagctagcgaatctgctgggtcttgagacctctgtcagaagagtgatgctatatcaccaaggctgttatgctggtggtaccgttttgagaactgctaaagacttggccgagaataacgctggcgcaagggttttggtagtatgttccgagattactgttgtgacttttagaggcccttcagaaacccatctacatagtcttgttggtcaggcactttttggtgatggtagtacaacaatcatcgttggctcagaccccgacacatcaatcgagaggccactatttcagctaatatctgcagcccaaacttttataccaaacacccaaggtgctattgtaggcaacctgcgtgaagtcggtctaactttccatttgtggcctaatgtacctacgcttatatcagaaaatatcgaaaaatgcctgacgcaggcatttgcacctttaggtatttcagattggaattcgttattctggattgcgcatcctggggggcctgccatattggatgccgttgaagcgaaacttaacctggaaaagaagaaattagaagctactagacatatattttcggaatatgggaacatgtcgtcagcttgtgtgttgtttatcttggacgaaatgagaaagaaatctttgaaagaagaaaggacaacgaccggtaaagaattagattaactcgagcatgcatctagagggccgcatcatgtaattagttatgtcacgcttacattcacgccctccccccacatccgctctaaccgaaaaggaaggagttagacaacctgaagtctaggtccctatttatttttttatagttatgttagtattaagaacgttatttatatttcaaatttttcttttttttctgtacagacgcgtgtacgcatgtaacattatactgaaaaccttgcttgagaaggttttgggacgctcgaaggctttaatttgcggccctgcattaatgaatcggccaacgcgcggggagaggcggtttgcgtattgggcgctcttccgcttcctcgctcactgactcgctgcgctcggtcgttcggctgcggcgagcggtatcagctcactcaaaggcggtaatacggttatccacagaatcaggggataacgcaggaaagaacatgtgagcaaaaggccagcaaaagcccaggaaccgtaaaaaggccgcgttgctggcgtttttccataggctccgcccccctgacgagcatcacaaaaatcgacgctcaagtcagaggtggcgaaacccgacaggactataaagataccaggcgtttccccctggaagctccctcgtgcgctctcctgttccgaccctgccgcttaccggatacctgtccgcctttctcccttcgggaagcgtggcgctttctcatagctcacgctgtaggtatctcagttcggtgtaggtcgttcgctccaagctgggctgtgtgcacgaaccccccgttcagcccgaccgctgcgccttatccggtaactatcgtcttgagtccaacccggtaagacacgacttatcgccactggcagcagccactggtaacaggattagcagagcgaggtatgtaggcggtgctacagagttcttgaagtggtggcctaactacggctacactagaaggacagtatttggtatctgcgctctgctgaagccagttaccttcggaaaaagagttggtagctcttgatccggcaaacaaaccaccgctggtagcggtggtttttttgtttgcaagcagcagattacgcgcagaaaaaaaggatctcaagaagatcctttgatcttttctacggggtctgacgctcagtggaacgaaaactcacgttaagggattttggtcatgagattatcaaaaaggatcttcacctagatccttttaaattaaaaatgaagttttaaatcaatctaaagtatatatgagtaaacttggtctgacagttaccaatgcttaatcagtgaggcacctatctcagcgatctgtctatttcgttcatccatagttgcctgactccccgtcgtgtagataactacgatacgggagcgcttaccatctggccccagtgctgcaatgataccgcgagacccacgctcaccggctccagatttatcagcaataaaccagccagccggaagggccgagcgcagaagtggtcctgcaactttatccgcctccattcagtctattaattgttgccgggaagctagagtaagtagttcgccagttaatagtttgcgcaacgttgttggcattgctacaggcatcgtggtgtcactctcgtcgtttggtatggcttcattcagctccggttcccaacgatcaaggcgagttacatgatcccccatgttgtgcaaaaaagcggttagctccttcggtcctccgatcgttgtcagaagtaagttggccgcagtgttatcactcatggttatggcagcactgcataattctcttactgtcatgccatccgtaagatgcttttctgtgactggtgagtactcaaccaagtcattctgagaatagtgtatgcggcgaccgagttgctcttgcccggcgtcaatacgggataatagtgtatcacatagcagaactttaaaagtgctcatcattggaaaacgttcttcggggcgaaaactctcaaggatcttaccgctgttgagatccagttcgatgtaacccactcgtgcacccaactgatcttcagcatcttttactttcaccagcgtttctgggtgagcaaaaacaggaaggcaaaatgccgcaaaaaagggaataagggcgacacggaaatgttgaatactcatactcttcctttttcaatgggtaataactgatataattaaattgaagctctaatttgtgagtttagtatacatgcatttacttataatacagttttttagttttgctggccgcatcttctcaaatatgcttcccagcctgcttttctgtaacgttcaccctctaccttagcatcccttccctttgcaaatagtcctcttccaacaataataatgtcagatcctgtagagaccacatcatccacggttctatactgttgacccaatgcgtctcccttgtcatctaaacccacaccgggtgtcataatcaaccaatcgtaaccttcatctcttccacccatgtctctttgagcaataaagccgataacaaaatctttgtcgctcttcgcaatgtcaacagtacccttagtatattctccagtagatagggagcccttgcatgacaattctgctaacatcaaaaggcctctaggttcctttgttacttcttctgccgcctgcttcaaaccgctaacaatacctgggcccaccacaccgtgtgcattcgtaatgtctgcccattctgctattctgtatacacccgcagagtactgcaatttgactgtattaccaatgtcagcaaattttctgtcttcg

SEQ ID NO: 394 - DNA, 6982 bp, Artificial Sequence
  PLAS493
aagagtaaaaaattgtacttggcggataatgcctttagcggcttaactgtgccctccatggaaaaatcagtcaagatatccacatgtgtttttagtaaacaaattttgggacctaatgcttcaactaactccagtaattccttggtggtacgaacatccaatgaagcacacaagtttgtttgcttttcgtgcatgatattaaatagcttggcagcaacaggactaggatgagtagcagcacgttccttatatgtagctttcgacatgatttatcttcgtttcctgcaggtttttgttctgtgcagttgggttaagaatactgggcaatttcatgtttcttcaacactacatatgcgtatatataccaatctaagtctgtgctccttccttcgttcttccttctgttcggagattaccgaatcaaaaaaatttcaaagaaaccgaaatcaaaaaaaagaataaaaaaaaaatgatgaattgaattgaaaagctagcttatcgatgataagctgtcaaagatgagaattaattccacggactatagactatactagatactccgtctactgtacgatacacttccgctcaggtccttgtcctttaacgaggccttaccactcttttgttactctattgatccagctcagcaaaggcagtgtgatctaagattctatcttcgcgatgtagtaaaactagctagaccgagaaagagactagaaatgcaaaaggcacttctacaatggctgccatcattattatccgatgtgacgctgcagcttctcaatgatattcgaatacgctttgaggagatacagcctaatatccgacaaactgttttacagatttacgatcgtacttgttacccatcattgaattttgaacatccgaacctgggagttttccctgaaacagatagtatatttgaacctgtataataatatatagtctagcgctttacggaagacaatgtatgtatttcggttcctggagaaactattgcatctattgcataggtaatcttgcacgtcgcatccccggttcattttctgcgtttccatcttgcacttcaatagcatatctttgttaacgaagcatctgtgcttcattttgtagaacaaaaatgcaacgcgagagcgctaatttttcaaacaaagaatctgagctgcatttttacagaacagaaatgcaacgcgaaagcgctattttaccaacgaagaatctgtgcttcatttttgtaaaacaaaaatgcaacgcgacgagagcgctaatttttcaaacaaagaatctgagctgcatttttacagaacagaaatgcaacgcgagagcgctattttaccaacaaagaatctatacttcttttttgttctacaaaaatgcatcccgagagcgctatttttctaacaaagcatcttagattactttttttctcctttgtgcgctctataatgcagtctcttgataactttttgcactgtaggtccgttaaggttagaagaaggctactttggtgtctattttctcttccataaaaaaagcctgactccacttcccgcgtttactgattactagcgaagctgcgggtgcattttttcaagataaaggcatccccgattatattctataccgatgtggattgcgcatactttgtgaacagaaagtgatagcgttgatgattcttcattggtcagaaaattatgaacggtttcttctattttgtctctatatactacgtataggaaatgtttacattttcgtattgttttcgattcactctatgaatagttcttactacaatttttttgtctaaagagtaatactagagataaacataaaaaatgtagaggtcgagtttagatgcaagttcaaggagcgaaaggtggatgggtaggttatatagggatatagcacagagatatatagcaaagagatacttttgagcaatgtttgtggaagcggtattcgcaatgggaagctccaccccggttgataatcagaaaagccccaaaaacaggaagattgtataagcaaatatttaaattgtaaacgttaatattttgttaaaattcgcgttaaatttttgttaaatcagctcattttttaacgaatagcccgaaatcggcaaaatcccttataaatcaaaagaatagaccgagatagggttgagtgttgttccagtttccaacaagagtccactattaaagaacgtggactccaacgtcaaagggcgaaaaagggtctatcagggcgatggcccactacgtgaaccatcaccctaatcaagttttttggggtcgaggtgccgtaaagcagtaaatcggaagggtaaacggatgcccccatttagagcttgacggggaaagccggcgaacgtggcgagaaaggaagggaagaaagcgaaaggagcgggggctagggcggtgggaagtgtaggggtcacgctgggcgtaaccaccacacccgccgcgcttaatggggcgctacagggcgcgtggggatgatccactagtacggattagaagccgccgagcgggtgacagccctccgaaggaagactctcctccgtgcgtcctcgtcttcaccggtcgcgttcctgaaacgcagatgtgcctcgcgccgcactgctccgaacaataaagattctacaatactagcttttatggttatgaagaggaaaaattggcagtaacctggccccacaaaccttcaaatgaacgaatcaaattaacaaccataggatgataatgcgattagttttttagccttatttctggggtaattaatcagcgaagcgatgatttttgatctattaacagatatataaatgcaaaaactgcataaccactttaactaatactttcaacattttcggtttgtattacttcttattcaaatgtaataaaagtatcaacaaaaaattgttaatatacctctatactttaacgtcaaggagaaaaaaccccggatcggactactagcagctgtaatacgactcactatagggaatattaagcttaaacaatggctgccaaggttaccgtagaagaagttaggaaagcacagagagctgagggccccgcatctgttttggctattgggacggtgacccctccgaactgcgtatatcaggcagattacgccgattactattttagagtgacaaagtctgaacatatgaccgaactgaaagagaaattcaaaagaatttgtagaaaaagtatgatccaaaaaagatacatgcaccttacagaagatatcttattggagaatccgaatatggctagctacagcgcaccatcgttgaatgctaggcaggctatactggtagaggaagttcctaaactaggtgctgctgccgccgaaaaagccctaaaggaatggggccagccaagatcacagattacacacataatattttgtactacctccggtgtcgatatgccgggtgccgatagcaggatcattaagttactagggctggatccatctgtcaaacgtgtcatgttgtaccaccaaggttgttttgccggcggaatggtcctacgtattgcaaaagacttagctgagaataatcgtggtgcgagggtattgattgtgtgttccgaaataaccgtagtcaccttccgtggtccatcagaagcccacttggattcccttgtcggacaggcattatttggggatggtgcagcggctgtcattgtcggagcagatccagatgagcatgtagagagacctttattccaaatggtttcggcctctgaaactatcttgcccaactctgacggtgcgatagagggtcacttaagagaagttggcttaactttccatttacaagaaagagttccagaattaatatcttcaaatattgaaagattattagaagagtcttttaaaccgttgggtataagtgattggaattcgatcttctgggttgcccatccagggggtccggctatccttaatgctgttgagtccaaagctggcatcgataaggctcgtctaagagcaaccagacaggttttgtctgaatatggcaatatgtcgtcggcgtgtgtccttttcatattggatgagatgcgtaagttctccgcagaggatgggagggcaacaaccggtgaagggatggattggggcgtgttgtttgggtttggacccggtctgacagttgagactgtcgttctacactcagtacctataactactggtcacgctgcataactcgagcatgcatctagagggccgcatcatgtaattagttatgtcacgcttacattcacgccctccccccacatccgctctaaccgaaaaggaaggagttagacaacctgaagtctaggtccctatttatttttttatagttatgttagtattaagaacgttatttatatttcaaatttttcttttttttctgtacagacgcgtgtacgcatgtaacattatactgaaaaccttgcttgagaaggttttgggacgctcgaaggctttaatttgcggccctgcattaatgaatcggccaacgcgcggggagaggcggtttgcgtattgggcgctcttccgcttcctcgctcactgactcgctgcgctcggtcgttcggctgcggcgagcggtatcagctcactcaaaggcggtaatacggttatccacagaatcaggggataacgcaggaaagaacatgtgagcaaaaggccagcaaaagcccaggaaccgtaaaaaggccgcgttgctggcgtttttccataggctccgcccccctgacgagcatcacaaaaatcgacgctcaagtcagaggtggcgaaacccgacaggactataaagataccaggcgtttccccctggaagctccctcgtgcgctctcctgttccgaccctgccgcttaccggatacctgtccgcctttctcccttcgggaagcgtggcgctttctcatagctcacgctgtaggtatctcagttcggtgtaggtcgttcgctccaagctgggctgtgtgcacgaaccccccgttcagcccgaccgctgcgccttatccggtaactatcgtcttgagtccaacccggtaagacacgacttatcgccactggcagcagccactggtaacaggattagcagagcgaggtatgtaggcggtgctacagagttcttgaagtggtggcctaactacggctacactagaaggacagtatttggtatctgcgctctgctgaagccagttaccttcggaaaaagagttggtagctcttgatccggcaaacaaaccaccgctggtagcggtggtttttttgtttgcaagcagcagattacgcgcagaaaaaaaggatctcaagaagatcctttgatcttttctacggggtctgacgctcagtggaacgaaaactcacgttaagggattttggtcatgagattatcaaaaaggatcttcacctagatccttttaaattaaaaatgaagttttaaatcaatctaaagtatatatgagtaaacttggtctgacagttaccaatgcttaatcagtgaggcacctatctcagcgatctgtctatttcgttcatccatagttgcctgactccccgtcgtgtagataactacgatacgggagcgcttaccatctggccccagtgctgcaatgataccgcgagacccacgctcaccggctccagatttatcagcaataaaccagccagccggaagggccgagcgcagaagtggtcctgcaactttatccgcctccattcagtctattaattgttgccgggaagctagagtaagtagttcgccagttaatagtttgcgcaacgttgttggcattgctacaggcatcgtggtgtcactctcgtcgtttggtatggcttcattcagctccggttcccaacgatcaaggcgagttacatgatcccccatgttgtgcaaaaaagcggttagctccttcggtcctccgatcgttgtcagaagtaagttggccgcagtgttatcactcatggttatggcagcactgcataattctcttactgtcatgccatccgtaagatgcttttctgtgactggtgagtactcaaccaagtcattctgagaatagtgtatgcggcgaccgagttgctcttgcccggcgtcaatacgggataatagtgtatcacatagcagaactttaaaagtgctcatcattggaaaacgttcttcggggcgaaaactctcaaggatcttaccgctgttgagatccagttcgatgtaacccactcgtgcacccaactgatcttcagcatcttttactttcaccagcgtttctgggtgagcaaaaacaggaaggcaaaatgccgcaaaaaagggaataagggcgacacggaaatgttgaatactcatactcttcctttttcaatgggtaataactgatataattaaattgaagctctaatttgtgagtttagtatacatgcatttacttataatacagttttttagttttgctggccgcatcttctcaaatatgcttcccagcctgcttttctgtaacgttcaccctctaccttagcatcccttccctttgcaaatagtcctcttccaacaataataatgtcagatcctgtagagaccacatcatccacggttctatactgttgacccaatgcgtctcccttgtcatctaaacccacaccgggtgtcataatcaaccaatcgtaaccttcatctcttccacccatgtctctttgagcaataaagccgataacaaaatctttgtcgctcttcgcaatgtcaacagtacccttagtatattctccagtagatagggagcccttgcatgacaattctgctaacatcaaaaggcctctaggttcctttgttacttcttctgccgcctgcttcaaaccgctaacaatacctgggcccaccacaccgtgtgcattcgtaatgtctgcccattctgctattctgtatacacccgcagagtactgcaatttgactgtattaccaatgtcagcaaattttctgtcttcg

SEQ ID NO: 395 - DNA, 6991 bp, Artificial Sequence
  PLAS494
aagagtaaaaaattgtacttggcggataatgcctttagcggcttaactgtgccctccatggaaaaatcagtcaagatatccacatgtgtttttagtaaacaaattttgggacctaatgcttcaactaactccagtaattccttggtggtacgaacatccaatgaagcacacaagtttgtttgcttttcgtgcatgatattaaatagcttggcagcaacaggactaggatgagtagcagcacgttccttatatgtagctttcgacatgatttatcttcgtttcctgcaggtttttgttctgtgcagttgggttaagaatactgggcaatttcatgtttcttcaacactacatatgcgtatatataccaatctaagtctgtgctccttccttcgttcttccttctgttcggagattaccgaatcaaaaaaatttcaaagaaaccgaaatcaaaaaaaagaataaaaaaaaaatgatgaattgaattgaaaagctagcttatcgatgataagctgtcaaagatgagaattaattccacggactatagactatactagatactccgtctactgtacgatacacttccgctcaggtccttgtcctttaacgaggccttaccactcttttgttactctattgatccagctcagcaaaggcagtgtgatctaagattctatcttcgcgatgtagtaaaactagctagaccgagaaagagactagaaatgcaaaaggcacttctacaatggctgccatcattattatccgatgtgacgctgcagcttctcaatgatattcgaatacgctttgaggagatacagcctaatatccgacaaactgttttacagatttacgatcgtacttgttacccatcattgaattttgaacatccgaacctgggagttttccctgaaacagatagtatatttgaacctgtataataatatatagtctagcgctttacggaagacaatgtatgtatttcggttcctggagaaactattgcatctattgcataggtaatcttgcacgtcgcatccccggttcattttctgcgtttccatcttgcacttcaatagcatatctttgttaacgaagcatctgtgcttcattttgtagaacaaaaatgcaacgcgagagcgctaatttttcaaacaaagaatctgagctgcatttttacagaacagaaatgcaacgcgaaagcgctattttaccaacgaagaatctgtgcttcatttttgtaaaacaaaaatgcaacgcgacgagagcgctaatttttcaaacaaagaatctgagctgcatttttacagaacagaaatgcaacgcgagagcgctattttaccaacaaagaatctatacttcttttttgttctacaaaaatgcatcccgagagcgctatttttctaacaaagcatcttagattactttttttctcctttgtgcgctctataatgcagtctcttgataactttttgcactgtaggtccgttaaggttagaagaaggctactttggtgtctattttctcttccataaaaaaagcctgactccacttcccgcgtttactgattactagcgaagctgcgggtgcattttttcaagataaaggcatccccgattatattctataccgatgtggattgcgcatactttgtgaacagaaagtgatagcgttgatgattcttcattggtcagaaaattatgaacggtttcttctattttgtctctatatactacgtataggaaatgtttacattttcgtattgttttcgattcactctatgaatagttcttactacaatttttttgtctaaagagtaatactagagataaacataaaaaatgtagaggtcgagtttagatgcaagttcaaggagcgaaaggtggatgggtaggttatatagggatatagcacagagatatatagcaaagagatacttttgagcaatgtttgtggaagcggtattcgcaatgggaagctccaccccggttgataatcagaaaagccccaaaaacaggaagattgtataagcaaatatttaaattgtaaacgttaatattttgttaaaattcgcgttaaatttttgttaaatcagctcattttttaacgaatagcccgaaatcggcaaaatcccttataaatcaaaagaatagaccgagatagggttgagtgttgttccagtttccaacaagagtccactattaaagaacgtggactccaacgtcaaagggcgaaaaagggtctatcagggcgatggcccactacgtgaaccatcaccctaatcaagttttttggggtcgaggtgccgtaaagcagtaaatcggaagggtaaacggatgcccccatttagagcttgacggggaaagccggcgaacgtggcgagaaaggaagggaagaaagcgaaaggagcgggggctagggcggtgggaagtgtaggggtcacgctgggcgtaaccaccacacccgccgcgcttaatggggcgctacagggcgcgtggggatgatccactagtacggattagaagccgccgagcgggtgacagccctccgaaggaagactctcctccgtgcgtcctcgtcttcaccggtcgcgttcctgaaacgcagatgtgcctcgcgccgcactgctccgaacaataaagattctacaatactagcttttatggttatgaagaggaaaaattggcagtaacctggccccacaaaccttcaaatgaacgaatcaaattaacaaccataggatgataatgcgattagttttttagccttatttctggggtaattaatcagcgaagcgatgatttttgatctattaacagatatataaatgcaaaaactgcataaccactttaactaatactttcaacattttcggtttgtattacttcttattcaaatgtaataaaagtatcaacaaaaaattgttaatatacctctatactttaacgtcaaggagaaaaaaccccggatcggactactagcagctgtaatacgactcactatagggaatattaagcttaaacaatggcaggagctacagtaaccgtcgatgaagtgagaaaagggcaacgtgctactggtcctgcaactgtgttagccattgggacggcaactcctgctaattgcgtataccaggccgactacccagattactacttcagaataactaaaagtgaccatttaactgacttgaaggagaagtttaagaggatgtgtgataaatccatgatccgtaagaggtatatgcatcttaccgaagaattcctgtccgaaaacccttcaatgtgtgcatatatggctccatcccttgatgcaaggcaagatgttgtggttaccgaggtaccaaaactgggcaaagcagctgcacaaaaggccattaaagagtggggtcagccaaagagtagaattactcatttggtgttttgtacaacatctggcgttgacatgcctggcgcagactaccagttaacgaaagctttaggcctgagacccagcgttaatagactgatgatgtaccaacaaggctgctttgcaggaggtactgttttaagagtcgcgaaagatcttgccgaaaataacagaggagctcgtgttcttgtagtgtgttcggagattactgccgtcacgtttcgtggtccttcggagtcccatcttgattcactggtagggcaagcactattcggcgatggagctgcagccgttgttgtcggtgctgaccctgatgggagggttgaaagacctttatttcaactggtatccgctgcacaaacaatcctgccagatagtgagggcgcaattgacggtcatcttagagaagttggtttaacctttcatcttcttaaagatgttcctggtttgattagtaaaaatatagaaagggctttggaggatgcatttgagccattaggcatttcggattggaattcaatattctgggttgctcatcctggaggccccgctattttagatcaagttgaagctagagtggggttggataaggcaaggatgagagctacaaggcacgtattgtctgaatacggtaatatgtccagtgcttgtgtattatttatattggatgagatgagaaagaggtctgccgaagatggtcaagcaacaacaggtgaaggtctagattggggcgtattattcggttttggtccaggattgactgtcgaaactgttgtcttacattctgttccaatcaccaccggtgctcctaccgctgcctaactcgagcatgcatctagagggccgcatcatgtaattagttatgtcacgcttacattcacgccctccccccacatccgctctaaccgaaaaggaaggagttagacaacctgaagtctaggtccctatttatttttttatagttatgttagtattaagaacgttatttatatttcaaatttttcttttttttctgtacagacgcgtgtacgcatgtaacattatactgaaaaccttgcttgagaaggttttgggacgctcgaaggctttaatttgcggccctgcattaatgaatcggccaacgcgcggggagaggcggtttgcgtattgggcgctcttccgcttcctcgctcactgactcgctgcgctcggtcgttcggctgcggcgagcggtatcagctcactcaaaggcggtaatacggttatccacagaatcaggggataacgcaggaaagaacatgtgagcaaaaggccagcaaaagcccaggaaccgtaaaaaggccgcgttgctggcgtttttccataggctccgcccccctgacgagcatcacaaaaatcgacgctcaagtcagaggtggcgaaacccgacaggactataaagataccaggcgtttccccctggaagctccctcgtgcgctctcctgttccgaccctgccgcttaccggatacctgtccgcctttctcccttcgggaagcgtggcgctttctcatagctcacgctgtaggtatctcagttcggtgtaggtcgttcgctccaagctgggctgtgtgcacgaaccccccgttcagcccgaccgctgcgccttatccggtaactatcgtcttgagtccaacccggtaagacacgacttatcgccactggcagcagccactggtaacaggattagcagagcgaggtatgtaggcggtgctacagagttcttgaagtggtggcctaactacggctacactagaaggacagtatttggtatctgcgctctgctgaagccagttaccttcggaaaaagagttggtagctcttgatccggcaaacaaaccaccgctggtagcggtggtttttttgtttgcaagcagcagattacgcgcagaaaaaaaggatctcaagaagatcctttgatcttttctacggggtctgacgctcagtggaacgaaaactcacgttaagggattttggtcatgagattatcaaaaaggatcttcacctagatccttttaaattaaaaatgaagttttaaatcaatctaaagtatatatgagtaaacttggtctgacagttaccaatgcttaatcagtgaggcacctatctcagcgatctgtctatttcgttcatccatagttgcctgactccccgtcgtgtagataactacgatacgggagcgcttaccatctggccccagtgctgcaatgataccgcgagacccacgctcaccggctccagatttatcagcaataaaccagccagccggaagggccgagcgcagaagtggtcctgcaactttatccgcctccattcagtctattaattgttgccgggaagctagagtaagtagttcgccagttaatagtttgcgcaacgttgttggcattgctacaggcatcgtggtgtcactctcgtcgtttggtatggcttcattcagctccggttcccaacgatcaaggcgagttacatgatcccccatgttgtgcaaaaaagcggttagctccttcggtcctccgatcgttgtcagaagtaagttggccgcagtgttatcactcatggttatggcagcactgcataattctcttactgtcatgccatccgtaagatgcttttctgtgactggtgagtactcaaccaagtcattctgagaatagtgtatgcggcgaccgagttgctcttgcccggcgtcaatacgggataatagtgtatcacatagcagaactttaaaagtgctcatcattggaaaacgttcttcggggcgaaaactctcaaggatcttaccgctgttgagatccagttcgatgtaacccactcgtgcacccaactgatcttcagcatcttttactttcaccagcgtttctgggtgagcaaaaacaggaaggcaaaatgccgcaaaaaagggaataagggcgacacggaaatgttgaatactcatactcttcctttttcaatgggtaataactgatataattaaattgaagctctaatttgtgagtttagtatacatgcatttacttataatacagttttttagttttgctggccgcatcttctcaaatatgcttcccagcctgcttttctgtaacgttcaccctctaccttagcatcccttccctttgcaaatagtcctcttccaacaataataatgtcagatcctgtagagaccacatcatccacggttctatactgttgacccaatgcgtctcccttgtcatctaaacccacaccgggtgtcataatcaaccaatcgtaaccttcatctcttccacccatgtctctttgagcaataaagccgataacaaaatctttgtcgctcttcgcaatgtcaacagtacccttagtatattctccagtagatagggagcccttgcatgacaattctgctaacatcaaaaggcctctaggttcctttgttacttcttctgccgcctgcttcaaaccgctaacaatacctgggcccaccacaccgtgtgcattcgtaatgtctgcccattctgctattctgtatacacccgcagagtactgcaatttgactgtattaccaatgtcagcaaattttctgtcttcg

SEQ ID NO: 396 - DNA, 6925 bp, Artificial Sequence
  PLAS495
aagagtaaaaaattgtacttggcggataatgcctttagcggcttaactgtgccctccatggaaaaatcagtcaagatatccacatgtgtttttagtaaacaaattttgggacctaatgcttcaactaactccagtaattccttggtggtacgaacatccaatgaagcacacaagtttgtttgcttttcgtgcatgatattaaatagcttggcagcaacaggactaggatgagtagcagcacgttccttatatgtagctttcgacatgatttatcttcgtttcctgcaggtttttgttctgtgcagttgggttaagaatactgggcaatttcatgtttcttcaacactacatatgcgtatatataccaatctaagtctgtgctccttccttcgttcttccttctgttcggagattaccgaatcaaaaaaatttcaaagaaaccgaaatcaaaaaaaagaataaaaaaaaaatgatgaattgaattgaaaagctagcttatcgatgataagctgtcaaagatgagaattaattccacggactatagactatactagatactccgtctactgtacgatacacttccgctcaggtccttgtcctttaacgaggccttaccactcttttgttactctattgatccagctcagcaaaggcagtgtgatctaagattctatcttcgcgatgtagtaaaactagctagaccgagaaagagactagaaatgcaaaaggcacttctacaatggctgccatcattattatccgatgtgacgctgcagcttctcaatgatattcgaatacgctttgaggagatacagcctaatatccgacaaactgttttacagatttacgatcgtacttgttacccatcattgaattttgaacatccgaacctgggagttttccctgaaacagatagtatatttgaacctgtataataatatatagtctagcgctttacggaagacaatgtatgtatttcggttcctggagaaactattgcatctattgcataggtaatcttgcacgtcgcatccccggttcattttctgcgtttccatcttgcacttcaatagcatatctttgttaacgaagcatctgtgcttcattttgtagaacaaaaatgcaacgcgagagcgctaatttttcaaacaaagaatctgagctgcatttttacagaacagaaatgcaacgcgaaagcgctattttaccaacgaagaatctgtgcttcatttttgtaaaacaaaaatgcaacgcgacgagagcgctaatttttcaaacaaagaatctgagctgcatttttacagaacagaaatgcaacgcgagagcgctattttaccaacaaagaatctatacttcttttttgttctacaaaaatgcatcccgagagcgctatttttctaacaaagcatcttagattactttttttctcctttgtgcgctctataatgcagtctcttgataactttttgcactgtaggtccgttaaggttagaagaaggctactttggtgtctattttctcttccataaaaaaagcctgactccacttcccgcgtttactgattactagcgaagctgcgggtgcattttttcaagataaaggcatccccgattatattctataccgatgtggattgcgcatactttgtgaacagaaagtgatagcgttgatgattcttcattggtcagaaaattatgaacggtttcttctattttgtctctatatactacgtataggaaatgtttacattttcgtattgttttcgattcactctatgaatagttcttactacaatttttttgtctaaagagtaatactagagataaacataaaaaatgtagaggtcgagtttagatgcaagttcaaggagcgaaaggtggatgggtaggttatatagggatatagcacagagatatatagcaaagagatacttttgagcaatgtttgtggaagcggtattcgcaatgggaagctccaccccggttgataatcagaaaagccccaaaaacaggaagattgtataagcaaatatttaaattgtaaacgttaatattttgttaaaattcgcgttaaatttttgttaaatcagctcattttttaacgaatagcccgaaatcggcaaaatcccttataaatcaaaagaatagaccgagatagggttgagtgttgttccagtttccaacaagagtccactattaaagaacgtggactccaacgtcaaagggcgaaaaagggtctatcagggcgatggcccactacgtgaaccatcaccctaatcaagttttttggggtcgaggtgccgtaaagcagtaaatcggaagggtaaacggatgcccccatttagagcttgacggggaaagccggcgaacgtggcgagaaaggaagggaagaaagcgaaaggagcgggggctagggcggtgggaagtgtaggggtcacgctgggcgtaaccaccacacccgccgcgcttaatggggcgctacagggcgcgtggggatgatccactagtacggattagaagccgccgagcgggtgacagccctccgaaggaagactctcctccgtgcgtcctcgtcttcaccggtcgcgttcctgaaacgcagatgtgcctcgcgccgcactgctccgaacaataaagattctacaatactagcttttatggttatgaagaggaaaaattggcagtaacctggccccacaaaccttcaaatgaacgaatcaaattaacaaccataggatgataatgcgattagttttttagccttatttctggggtaattaatcagcgaagcgatgatttttgatctattaacagatatataaatgcaaaaactgcataaccactttaactaatactttcaacattttcggtttgtattacttcttattcaaatgtaataaaagtatcaacaaaaaattgttaatatacctctatactttaacgtcaaggagaaaaaaccccggatcggactactagcagctgtaatacgactcactatagggaatattaagcttaaacaatggcaggggcaacagtcaccgttgaagaagttaggaaagcccaaagagcgacaggtcctgcaacggtcttggctattggtacagcaactccagccaactgtgtttaccaagccgattaccccgattattacttccgtattaccaagtccgaacatttgaccgatcttaaagaaaaatttaaaaggatgtgtgataagtcgatgataagaaagcgttatatgcaccttaccgaggagtttttggctgaaaatccaagtatgtgtgcttatatggcgccaagtttagatgcaagacaagatgtggttgtggtggaagttcctaaattaggtaaagccgccgcccaaaaggcaattaaagagtggggtcagccgaagtcgagaattacacacctagttttttgcacaacttcgggggttgacatgccgggtgctgattaccagttaacaaaagcattgggtctaaggccatcagttaatagattaatgatgtatcagcaaggatgttttgccggaggcactgtgctaagggttgccaaggacttggcagagaacaacagaggcgctcgtgtcttggtagtttgctcagagattacagcagtgacctttagagggccatcagaatctcatttagacagtttggttggacaagcattattcggtgacggggctgccgctgttgttgtcggcgctgaccccgatgacagggttgagcgtccgttgtttcagttggtaagcgctgctcagacaatcttgcctgattctgaaggtgctatcgatggccaccttcgtgaagttggattaacatttcatctgttgaaggacgttcccggcttgattagcaaaaacattggaagagcgctagacgatgcatttaagcctctgggtatctcagactggaattctattttttgggttgctcacccagggggccccgctattttggatcaagtggaggctaaggtcggtttagataaagcaagaatgcgtgcaacacgtcacgttttgtccgaatacggtaacatgagtagtgcatgcgtactatttatattagatgagatgaggaaaaggtctgccgaagatggacaagctactaccggggaaggtcttgattggggagtgctttttgttaaagttgcatgactcgagcatgcatctagagggccgcatcatgtaattagttatgtcacgcttacattcacgccctccccccacatccgctctaaccgaaaaggaaggagttagacaacctgaagtctaggtccctatttatttttttatagttatgttagtattaagaacgttatttatatttcaaatttttcttttttttctgtacagacgcgtgtacgcatgtaacattatactgaaaaccttgcttgagaaggttttgggacgctcgaaggctttaatttgcggccctgcattaatgaatcggccaacgcgcggggagaggcggtttgcgtattgggcgctcttccgcttcctcgctcactgactcgctgcgctcggtcgttcggctgcggcgagcggtatcagctcactcaaaggcggtaatacggttatccacagaatcaggggataacgcaggaaagaacatgtgagcaaaaggccagcaaaagcccaggaaccgtaaaaaggccgcgttgctggcgtttttccataggctccgcccccctgacgagcatcacaaaaatcgacgctcaagtcagaggtggcgaaacccgacaggactataaagataccaggcgtttccccctggaagctccctcgtgcgctctcctgttccgaccctgccgcttaccggatacctgtccgcctttctcccttcgggaagcgtggcgctttctcatagctcacgctgtaggtatctcagttcggtgtaggtcgttcgctccaagctgggctgtgtgcacgaaccccccgttcagcccgaccgctgcgccttatccggtaactatcgtcttgagtccaacccggtaagacacgacttatcgccactggcagcagccactggtaacaggattagcagagcgaggtatgtaggcggtgctacagagttcttgaagtggtggcctaactacggctacactagaaggacagtatttggtatctgcgctctgctgaagccagttaccttcggaaaaagagttggtagctcttgatccggcaaacaaaccaccgctggtagcggtggtttttttgtttgcaagcagcagattacgcgcagaaaaaaaggatctcaagaagatcctttgatcttttctacggggtctgacgctcagtggaacgaaaactcacgttaagggattttggtcatgagattatcaaaaaggatcttcacctagatccttttaaattaaaaatgaagttttaaatcaatctaaagtatatatgagtaaacttggtctgacagttaccaatgcttaatcagtgaggcacctatctcagcgatctgtctatttcgttcatccatagttgcctgactccccgtcgtgtagataactacgatacgggagcgcttaccatctggccccagtgctgcaatgataccgcgagacccacgctcaccggctccagatttatcagcaataaaccagccagccggaagggccgagcgcagaagtggtcctgcaactttatccgcctccattcagtctattaattgttgccgggaagctagagtaagtagttcgccagttaatagtttgcgcaacgttgttggcattgctacaggcatcgtggtgtcactctcgtcgtttggtatggcttcattcagctccggttcccaacgatcaaggcgagttacatgatcccccatgttgtgcaaaaaagcggttagctccttcggtcctccgatcgttgtcagaagtaagttggccgcagtgttatcactcatggttatggcagcactgcataattctcttactgtcatgccatccgtaagatgcttttctgtgactggtgagtactcaaccaagtcattctgagaatagtgtatgcggcgaccgagttgctcttgcccggcgtcaatacgggataatagtgtatcacatagcagaactttaaaagtgctcatcattggaaaacgttcttcggggcgaaaactctcaaggatcttaccgctgttgagatccagttcgatgtaacccactcgtgcacccaactgatcttcagcatcttttactttcaccagcgtttctgggtgagcaaaaacaggaaggcaaaatgccgcaaaaaagggaataagggcgacacggaaatgttgaatactcatactcttcctttttcaatgggtaataactgatataattaaattgaagctctaatttgtgagtttagtatacatgcatttacttataatacagttttttagttttgctggccgcatcttctcaaatatgcttcccagcctgcttttctgtaacgttcaccctctaccttagcatcccttccctttgcaaatagtcctcttccaacaataataatgtcagatcctgtagagaccacatcatccacggttctatactgttgacccaatgcgtctcccttgtcatctaaacccacaccgggtgtcataatcaaccaatcgtaaccttcatctcttccacccatgtctctttgagcaataaagccgataacaaaatctttgtcgctcttcgcaatgtcaacagtacccttagtatattctccagtagatagggagcccttgcatgacaattctgctaacatcaaaaggcctctaggttcctttgttacttcttctgccgcctgcttcaaaccgctaacaatacctgggcccaccacaccgtgtgcattcgtaatgtctgcccattctgctattctgtatacacccgcagagtactgcaatttgactgtattaccaatgtcagcaaattttctgtcttcg

SEQ ID NO: 397 - DNA, 6973 bp, Artificial Sequence
  PLAS496
aagagtaaaaaattgtacttggcggataatgcctttagcggcttaactgtgccctccatggaaaaatcagtcaagatatccacatgtgtttttagtaaacaaattttgggacctaatgcttcaactaactccagtaattccttggtggtacgaacatccaatgaagcacacaagtttgtttgcttttcgtgcatgatattaaatagcttggcagcaacaggactaggatgagtagcagcacgttccttatatgtagctttcgacatgatttatcttcgtttcctgcaggtttttgttctgtgcagttgggttaagaatactgggcaatttcatgtttcttcaacactacatatgcgtatatataccaatctaagtctgtgctccttccttcgttcttccttctgttcggagattaccgaatcaaaaaaatttcaaagaaaccgaaatcaaaaaaaagaataaaaaaaaaatgatgaattgaattgaaaagctagcttatcgatgataagctgtcaaagatgagaattaattccacggactatagactatactagatactccgtctactgtacgatacacttccgctcaggtccttgtcctttaacgaggccttaccactcttttgttactctattgatccagctcagcaaaggcagtgtgatctaagattctatcttcgcgatgtagtaaaactagctagaccgagaaagagactagaaatgcaaaaggcacttctacaatggctgccatcattattatccgatgtgacgctgcagcttctcaatgatattcgaatacgctttgaggagatacagcctaatatccgacaaactgttttacagatttacgatcgtacttgttacccatcattgaattttgaacatccgaacctgggagttttccctgaaacagatagtatatttgaacctgtataataatatatagtctagcgctttacggaagacaatgtatgtatttcggttcctggagaaactattgcatctattgcataggtaatcttgcacgtcgcatccccggttcattttctgcgtttccatcttgcacttcaatagcatatctttgttaacgaagcatctgtgcttcattttgtagaacaaaaatgcaacgcgagagcgctaatttttcaaacaaagaatctgagctgcatttttacagaacagaaatgcaacgcgaaagcgctattttaccaacgaagaatctgtgcttcatttttgtaaaacaaaaatgcaacgcgacgagagcgctaatttttcaaacaaagaatctgagctgcatttttacagaacagaaatgcaacgcgagagcgctattttaccaacaaagaatctatacttcttttttgttctacaaaaatgcatcccgagagcgctatttttctaacaaagcatcttagattactttttttctcctttgtgcgctctataatgcagtctcttgataactttttgcactgtaggtccgttaaggttagaagaaggctactttggtgtctattttctcttccataaaaaaagcctgactccacttcccgcgtttactgattactagcgaagctgcgggtgcattttttcaagataaaggcatccccgattatattctataccgatgtggattgcgcatactttgtgaacagaaagtgatagcgttgatgattcttcattggtcagaaaattatgaacggtttcttctattttgtctctatatactacgtataggaaatgtttacattttcgtattgttttcgattcactctatgaatagttcttactacaatttttttgtctaaagagtaatactagagataaacataaaaaatgtagaggtcgagtttagatgcaagttcaaggagcgaaaggtggatgggtaggttatatagggatatagcacagagatatatagcaaagagatacttttgagcaatgtttgtggaagcggtattcgcaatgggaagctccaccccggttgataatcagaaaagccccaaaaacaggaagattgtataagcaaatatttaaattgtaaacgttaatattttgttaaaattcgcgttaaatttttgttaaatcagctcattttttaacgaatagcccgaaatcggcaaaatcccttataaatcaaaagaatagaccgagatagggttgagtgttgttccagtttccaacaagagtccactattaaagaacgtggactccaacgtcaaagggcgaaaaagggtctatcagggcgatggcccactacgtgaaccatcaccctaatcaagttttttggggtcgaggtgccgtaaagcagtaaatcggaagggtaaacggatgcccccatttagagcttgacggggaaagccggcgaacgtggcgagaaaggaagggaagaaagcgaaaggagcgggggctagggcggtgggaagtgtaggggtcacgctgggcgtaaccaccacacccgccgcgcttaatggggcgctacagggcgcgtggggatgatccactagtacggattagaagccgccgagcgggtgacagccctccgaaggaagactctcctccgtgcgtcctcgtcttcaccggtcgcgttcctgaaacgcagatgtgcctcgcgccgcactgctccgaacaataaagattctacaatactagcttttatggttatgaagaggaaaaattggcagtaacctggccccacaaaccttcaaatgaacgaatcaaattaacaaccataggatgataatgcgattagttttttagccttatttctggggtaattaatcagcgaagcgatgatttttgatctattaacagatatataaatgcaaaaactgcataaccactttaactaatactttcaacattttcggtttgtattacttcttattcaaatgtaataaaagtatcaacaaaaaattgttaatatacctctatactttaacgtcaaggagaaaaaaccccggatcggactactagcagctgtaatacgactcactatagggaatattaagcttaaacaatggcttcaatcactgtcgatcaaattaggaaatcacagcgtgcagatacacctgctgcaattttggcgataggtaccgctaaccctgccaactttgtgactcaagccaattaccctgactattatttcaatgtaacaaaatcccaacatatgacgaatctaaaaaataaattccaacacatttgcaacaacactacaatcagaaaaagatatacacatttggacgaagaatatttaaagcaaaatccaaatatgtgcgaatacatggctccttcattaaatgccagacagagtatgttagtcactgaagtacctaaactgggaaaagaggctgctatgaaagcaatcaaggaatggggtcaacctaacaagtcaaaaattacacacttgatattttgcactatgtcaggaatcgatatgcctggagctgattatcactgtgcaaagttgttggaactagaaccaactgttaagagagttatgttataccagcatggttgccacggagggggtactgttctgcgtttggcaaaggatttagcggagaataataagggtgctagagttttagccgtttgctcagacataatggcctttatgtttagaggcccgacaaagagtcatttagcttcaatggtcggtcaggctttattcggagatggcgcttccgcggttattgtgggtgcagaaccaaacgaaagtatgggagaaagaccaatattcgaactagtctcagcagcgcaaactattttacctaattctgacaaagcgataatcggaaacgttagagaaatgggtttgacttttgatttaagaaaagatgtacatctactgatttcgaacaatattgaaaaatcattgatggaagcatttactcctattggtatcagcgactggaattcacttttctggataacccatccaggaggacctacaatattgaacgcagtagaggctgaacttcaattaaaaaaagagaaactagaaattagccgttatgttcttagtgaatatgggaatatgtcttcctcgtgtgtattttttataatggatgaattgaggaaaagatccttgaaggaaggaaagagtacgactggtgatggctttgagtggggggtcctattcggtttcggtcccggcttgactgtagagacattggtactgcattcagttgctataaaaaattaactcgagcatgcatctagagggccgcatcatgtaattagttatgtcacgcttacattcacgccctccccccacatccgctctaaccgaaaaggaaggagttagacaacctgaagtctaggtccctatttatttttttatagttatgttagtattaagaacgttatttatatttcaaatttttcttttttttctgtacagacgcgtgtacgcatgtaacattatactgaaaaccttgcttgagaaggttttgggacgctcgaaggctttaatttgcggccctgcattaatgaatcggccaacgcgcggggagaggcggtttgcgtattgggcgctcttccgcttcctcgctcactgactcgctgcgctcggtcgttcggctgcggcgagcggtatcagctcactcaaaggcggtaatacggttatccacagaatcaggggataacgcaggaaagaacatgtgagcaaaaggccagcaaaagcccaggaaccgtaaaaaggccgcgttgctggcgtttttccataggctccgcccccctgacgagcatcacaaaaatcgacgctcaagtcagaggtggcgaaacccgacaggactataaagataccaggcgtttccccctggaagctccctcgtgcgctctcctgttccgaccctgccgcttaccggatacctgtccgcctttctcccttcgggaagcgtggcgctttctcatagctcacgctgtaggtatctcagttcggtgtaggtcgttcgctccaagctgggctgtgtgcacgaaccccccgttcagcccgaccgctgcgccttatccggtaactatcgtcttgagtccaacccggtaagacacgacttatcgccactggcagcagccactggtaacaggattagcagagcgaggtatgtaggcggtgctacagagttcttgaagtggtggcctaactacggctacactagaaggacagtatttggtatctgcgctctgctgaagccagttaccttcggaaaaagagttggtagctcttgatccggcaaacaaaccaccgctggtagcggtggtttttttgtttgcaagcagcagattacgcgcagaaaaaaaggatctcaagaagatcctttgatcttttctacggggtctgacgctcagtggaacgaaaactcacgttaagggattttggtcatgagattatcaaaaaggatcttcacctagatccttttaaattaaaaatgaagttttaaatcaatctaaagtatatatgagtaaacttggtctgacagttaccaatgcttaatcagtgaggcacctatctcagcgatctgtctatttcgttcatccatagttgcctgactccccgtcgtgtagataactacgatacgggagcgcttaccatctggccccagtgctgcaatgataccgcgagacccacgctcaccggctccagatttatcagcaataaaccagccagccggaagggccgagcgcagaagtggtcctgcaactttatccgcctccattcagtctattaattgttgccgggaagctagagtaagtagttcgccagttaatagtttgcgcaacgttgttggcattgctacaggcatcgtggtgtcactctcgtcgtttggtatggcttcattcagctccggttcccaacgatcaaggcgagttacatgatcccccatgttgtgcaaaaaagcggttagctccttcggtcctccgatcgttgtcagaagtaagttggccgcagtgttatcactcatggttatggcagcactgcataattctcttactgtcatgccatccgtaagatgcttttctgtgactggtgagtactcaaccaagtcattctgagaatagtgtatgcggcgaccgagttgctcttgcccggcgtcaatacgggataatagtgtatcacatagcagaactttaaaagtgctcatcattggaaaacgttcttcggggcgaaaactctcaaggatcttaccgctgttgagatccagttcgatgtaacccactcgtgcacccaactgatcttcagcatcttttactttcaccagcgtttctgggtgagcaaaaacaggaaggcaaaatgccgcaaaaaagggaataagggcgacacggaaatgttgaatactcatactcttcctttttcaatgggtaataactgatataattaaattgaagctctaatttgtgagtttagtatacatgcatttacttataatacagttttttagttttgctggccgcatcttctcaaatatgcttcccagcctgcttttctgtaacgttcaccctctaccttagcatcccttccctttgcaaatagtcctcttccaacaataataatgtcagatcctgtagagaccacatcatccacggttctatactgttgacccaatgcgtctcccttgtcatctaaacccacaccgggtgtcataatcaaccaatcgtaaccttcatctcttccacccatgtctctttgagcaataaagccgataacaaaatctttgtcgctcttcgcaatgtcaacagtacccttagtatattctccagtagatagggagcccttgcatgacaattctgctaacatcaaaaggcctctaggttcctttgttacttcttctgccgcctgcttcaaaccgctaacaatacctgggcccaccacaccgtgtgcattcgtaatgtctgcccattctgctattctgtatacacccgcagagtactgcaatttgactgtattaccaatgtcagcaaattttctgtcttcg

SEQ ID NO: 398 - DNA, 6922 bp, Artificial Sequence
  PLAS497
aagagtaaaaaattgtacttggcggataatgcctttagcggcttaactgtgccctccatggaaaaatcagtcaagatatccacatgtgtttttagtaaacaaattttgggacctaatgcttcaactaactccagtaattccttggtggtacgaacatccaatgaagcacacaagtttgtttgcttttcgtgcatgatattaaatagcttggcagcaacaggactaggatgagtagcagcacgttccttatatgtagctttcgacatgatttatcttcgtttcctgcaggtttttgttctgtgcagttgggttaagaatactgggcaatttcatgtttcttcaacactacatatgcgtatatataccaatctaagtctgtgctccttccttcgttcttccttctgttcggagattaccgaatcaaaaaaatttcaaagaaaccgaaatcaaaaaaaagaataaaaaaaaaatgatgaattgaattgaaaagctagcttatcgatgataagctgtcaaagatgagaattaattccacggactatagactatactagatactccgtctactgtacgatacacttccgctcaggtccttgtcctttaacgaggccttaccactcttttgttactctattgatccagctcagcaaaggcagtgtgatctaagattctatcttcgcgatgtagtaaaactagctagaccgagaaagagactagaaatgcaaaaggcacttctacaatggctgccatcattattatccgatgtgacgctgcagcttctcaatgatattcgaatacgctttgaggagatacagcctaatatccgacaaactgttttacagatttacgatcgtacttgttacccatcattgaattttgaacatccgaacctgggagttttccctgaaacagatagtatatttgaacctgtataataatatatagtctagcgctttacggaagacaatgtatgtatttcggttcctggagaaactattgcatctattgcataggtaatcttgcacgtcgcatccccggttcattttctgcgtttccatcttgcacttcaatagcatatctttgttaacgaagcatctgtgcttcattttgtagaacaaaaatgcaacgcgagagcgctaatttttcaaacaaagaatctgagctgcatttttacagaacagaaatgcaacgcgaaagcgctattttaccaacgaagaatctgtgcttcatttttgtaaaacaaaaatgcaacgcgacgagagcgctaatttttcaaacaaagaatctgagctgcatttttacagaacagaaatgcaacgcgagagcgctattttaccaacaaagaatctatacttcttttttgttctacaaaaatgcatcccgagagcgctatttttctaacaaagcatcttagattactttttttctcctttgtgcgctctataatgcagtctcttgataactttttgcactgtaggtccgttaaggttagaagaaggctactttggtgtctattttctcttccataaaaaaagcctgactccacttcccgcgtttactgattactagcgaagctgcgggtgcattttttcaagataaaggcatccccgattatattctataccgatgtggattgcgcatactttgtgaacagaaagtgatagcgttgatgattcttcattggtcagaaaattatgaacggtttcttctattttgtctctatatactacgtataggaaatgtttacattttcgtattgttttcgattcactctatgaatagttcttactacaatttttttgtctaaagagtaatactagagataaacataaaaaatgtagaggtcgagtttagatgcaagttcaaggagcgaaaggtggatgggtaggttatatagggatatagcacagagatatatagcaaagagatacttttgagcaatgtttgtggaagcggtattcgcaatgggaagctccaccccggttgataatcagaaaagccccaaaaacaggaagattgtataagcaaatatttaaattgtaaacgttaatattttgttaaaattcgcgttaaatttttgttaaatcagctcattttttaacgaatagcccgaaatcggcaaaatcccttataaatcaaaagaatagaccgagatagggttgagtgttgttccagtttccaacaagagtccactattaaagaacgtggactccaacgtcaaagggcgaaaaagggtctatcagggcgatggcccactacgtgaaccatcaccctaatcaagttttttggggtcgaggtgccgtaaagcagtaaatcggaagggtaaacggatgcccccatttagagcttgacggggaaagccggcgaacgtggcgagaaaggaagggaagaaagcgaaaggagcgggggctagggcggtgggaagtgtaggggtcacgctgggcgtaaccaccacacccgccgcgcttaatggggcgctacagggcgcgtggggatgatccactagtacggattagaagccgccgagcgggtgacagccctccgaaggaagactctcctccgtgcgtcctcgtcttcaccggtcgcgttcctgaaacgcagatgtgcctcgcgccgcactgctccgaacaataaagattctacaatactagcttttatggttatgaagaggaaaaattggcagtaacctggccccacaaaccttcaaatgaacgaatcaaattaacaaccataggatgataatgcgattagttttttagccttatttctggggtaattaatcagcgaagcgatgatttttgatctattaacagatatataaatgcaaaaactgcataaccactttaactaatactttcaacattttcggtttgtattacttcttattcaaatgtaataaaagtatcaacaaaaaattgttaatatacctctatactttaacgtcaaggagaaaaaaccccggatcggactactagcagctgtaatacgactcactatagggaatattaagcttaaacaatgtcgactactggtgacagtgaaattaaaaatccttttattctaggcatgggtacagctaatccagaacgttatatcactgcaaaggaatttcatgaaaagattggggctccttttttaatacaagaagaatacttgaaaaaaacggaagaagtctatcccaaaatcggggttgaggggcgtcacttcggtcgtgactatacattgactaaaacctcttacccagtcagagctctgcagaatattgaacaagttaacaacgagtacattgggtttgctatggacattagtgaaaagtcatgcttaaaagcggtgcaagattggggtgggaatcctaaagatattacacactttgtcactgcaacgtgtactgggcaaatggttcccgatttgaacgcaagattgatccctattctgggactgaacgatgatattaatagagtctcatcgaacttcaatggctgttgtgctggtcttactacgatgaggattgctgctgatattgcaagagccaataagaacttcagattactagtgctttgtacggaactgtgtacccagcagatgtctttaagtgccgaatttgaccaagtaattacatcgtacttgtttggtgatggttctgccgcatatataatgggtagtgaacctaaggaatcagaaaaaccactatatgaagtgttgggatcgcatactaagataatccccaatacacaaaaccttttgaaatttgagttagctgttcaaggctggtcgatgacaatcgatccgatgataccaccaacgatttccacaaacgtgcaaggatttttgaataaaatgttagaagagaagtgcaacggtaataaattacctacagacctagtggcggagtgtgaatatcttttacatccgggaggcccaggcattctgaagggtatatgtaaaagtttgggtattactgattaccacgccagacacagttggcatgtgttgaaaaaatacggtaatatgagtagtgccactgtcctatttacgatgaattcggccagatacgataaggttgccaagccttatagcataagttttgctttcgggcctggtttggctgtcgaaggcatcgtcttgaaaaatcacttcattaacaacacaaatatactcgagcatgcatctagagggccgcatcatgtaattagttatgtcacgcttacattcacgccctccccccacatccgctctaaccgaaaaggaaggagttagacaacctgaagtctaggtccctatttatttttttatagttatgttagtattaagaacgttatttatatttcaaatttttcttttttttctgtacagacgcgtgtacgcatgtaacattatactgaaaaccttgcttgagaaggttttgggacgctcgaaggctttaatttgcggccctgcattaatgaatcggccaacgcgcggggagaggcggtttgcgtattgggcgctcttccgcttcctcgctcactgactcgctgcgctcggtcgttcggctgcggcgagcggtatcagctcactcaaaggcggtaatacggttatccacagaatcaggggataacgcaggaaagaacatgtgagcaaaaggccagcaaaagcccaggaaccgtaaaaaggccgcgttgctggcgtttttccataggctccgcccccctgacgagcatcacaaaaatcgacgctcaagtcagaggtggcgaaacccgacaggactataaagataccaggcgtttccccctggaagctccctcgtgcgctctcctgttccgaccctgccgcttaccggatacctgtccgcctttctcccttcgggaagcgtggcgctttctcatagctcacgctgtaggtatctcagttcggtgtaggtcgttcgctccaagctgggctgtgtgcacgaaccccccgttcagcccgaccgctgcgccttatccggtaactatcgtcttgagtccaacccggtaagacacgacttatcgccactggcagcagccactggtaacaggattagcagagcgaggtatgtaggcggtgctacagagttcttgaagtggtggcctaactacggctacactagaaggacagtatttggtatctgcgctctgctgaagccagttaccttcggaaaaagagttggtagctcttgatccggcaaacaaaccaccgctggtagcggtggtttttttgtttgcaagcagcagattacgcgcagaaaaaaaggatctcaagaagatcctttgatcttttctacggggtctgacgctcagtggaacgaaaactcacgttaagggattttggtcatgagattatcaaaaaggatcttcacctagatccttttaaattaaaaatgaagttttaaatcaatctaaagtatatatgagtaaacttggtctgacagttaccaatgcttaatcagtgaggcacctatctcagcgatctgtctatttcgttcatccatagttgcctgactccccgtcgtgtagataactacgatacgggagcgcttaccatctggccccagtgctgcaatgataccgcgagacccacgctcaccggctccagatttatcagcaataaaccagccagccggaagggccgagcgcagaagtggtcctgcaactttatccgcctccattcagtctattaattgttgccgggaagctagagtaagtagttcgccagttaatagtttgcgcaacgttgttggcattgctacaggcatcgtggtgtcactctcgtcgtttggtatggcttcattcagctccggttcccaacgatcaaggcgagttacatgatcccccatgttgtgcaaaaaagcggttagctccttcggtcctccgatcgttgtcagaagtaagttggccgcagtgttatcactcatggttatggcagcactgcataattctcttactgtcatgccatccgtaagatgcttttctgtgactggtgagtactcaaccaagtcattctgagaatagtgtatgcggcgaccgagttgctcttgcccggcgtcaatacgggataatagtgtatcacatagcagaactttaaaagtgctcatcattggaaaacgttcttcggggcgaaaactctcaaggatcttaccgctgttgagatccagttcgatgtaacccactcgtgcacccaactgatcttcagcatcttttactttcaccagcgtttctgggtgagcaaaaacaggaaggcaaaatgccgcaaaaaagggaataagggcgacacggaaatgttgaatactcatactcttcctttttcaatgggtaataactgatataattaaattgaagctctaatttgtgagtttagtatacatgcatttacttataatacagttttttagttttgctggccgcatcttctcaaatatgcttcccagcctgcttttctgtaacgttcaccctctaccttagcatcccttccctttgcaaatagtcctcttccaacaataataatgtcagatcctgtagagaccacatcatccacggttctatactgttgacccaatgcgtctcccttgtcatctaaacccacaccgggtgtcataatcaaccaatcgtaaccttcatctcttccacccatgtctctttgagcaataaagccgataacaaaatctttgtcgctcttcgcaatgtcaacagtacccttagtatattctccagtagatagggagcccttgcatgacaattctgctaacatcaaaaggcctctaggttcctttgttacttcttctgccgcctgcttcaaaccgctaacaatacctgggcccaccacaccgtgtgcattcgtaatgtctgcccattctgctattctgtatacacccgcagagtactgcaatttgactgtattaccaatgtcagcaaattttctgtcttcg

SEQ ID NO: 399 - DNA, 6916 bp, Artificial Sequence
  PLAS498
aagagtaaaaaattgtacttggcggataatgcctttagcggcttaactgtgccctccatggaaaaatcagtcaagatatccacatgtgtttttagtaaacaaattttgggacctaatgcttcaactaactccagtaattccttggtggtacgaacatccaatgaagcacacaagtttgtttgcttttcgtgcatgatattaaatagcttggcagcaacaggactaggatgagtagcagcacgttccttatatgtagctttcgacatgatttatcttcgtttcctgcaggtttttgttctgtgcagttgggttaagaatactgggcaatttcatgtttcttcaacactacatatgcgtatatataccaatctaagtctgtgctccttccttcgttcttccttctgttcggagattaccgaatcaaaaaaatttcaaagaaaccgaaatcaaaaaaaagaataaaaaaaaaatgatgaattgaattgaaaagctagcttatcgatgataagctgtcaaagatgagaattaattccacggactatagactatactagatactccgtctactgtacgatacacttccgctcaggtccttgtcctttaacgaggccttaccactcttttgttactctattgatccagctcagcaaaggcagtgtgatctaagattctatcttcgcgatgtagtaaaactagctagaccgagaaagagactagaaatgcaaaaggcacttctacaatggctgccatcattattatccgatgtgacgctgcagcttctcaatgatattcgaatacgctttgaggagatacagcctaatatccgacaaactgttttacagatttacgatcgtacttgttacccatcattgaattttgaacatccgaacctgggagttttccctgaaacagatagtatatttgaacctgtataataatatatagtctagcgctttacggaagacaatgtatgtatttcggttcctggagaaactattgcatctattgcataggtaatcttgcacgtcgcatccccggttcattttctgcgtttccatcttgcacttcaatagcatatctttgttaacgaagcatctgtgcttcattttgtagaacaaaaatgcaacgcgagagcgctaatttttcaaacaaagaatctgagctgcatttttacagaacagaaatgcaacgcgaaagcgctattttaccaacgaagaatctgtgcttcatttttgtaaaacaaaaatgcaacgcgacgagagcgctaatttttcaaacaaagaatctgagctgcatttttacagaacagaaatgcaacgcgagagcgctattttaccaacaaagaatctatacttcttttttgttctacaaaaatgcatcccgagagcgctatttttctaacaaagcatcttagattactttttttctcctttgtgcgctctataatgcagtctcttgataactttttgcactgtaggtccgttaaggttagaagaaggctactttggtgtctattttctcttccataaaaaaagcctgactccacttcccgcgtttactgattactagcgaagctgcgggtgcattttttcaagataaaggcatccccgattatattctataccgatgtggattgcgcatactttgtgaacagaaagtgatagcgttgatgattcttcattggtcagaaaattatgaacggtttcttctattttgtctctatatactacgtataggaaatgtttacattttcgtattgttttcgattcactctatgaatagttcttactacaatttttttgtctaaagagtaatactagagataaacataaaaaatgtagaggtcgagtttagatgcaagttcaaggagcgaaaggtggatgggtaggttatatagggatatagcacagagatatatagcaaagagatacttttgagcaatgtttgtggaagcggtattcgcaatgggaagctccaccccggttgataatcagaaaagccccaaaaacaggaagattgtataagcaaatatttaaattgtaaacgttaatattttgttaaaattcgcgttaaatttttgttaaatcagctcattttttaacgaatagcccgaaatcggcaaaatcccttataaatcaaaagaatagaccgagatagggttgagtgttgttccagtttccaacaagagtccactattaaagaacgtggactccaacgtcaaagggcgaaaaagggtctatcagggcgatggcccactacgtgaaccatcaccctaatcaagttttttggggtcgaggtgccgtaaagcagtaaatcggaagggtaaacggatgcccccatttagagcttgacggggaaagccggcgaacgtggcgagaaaggaagggaagaaagcgaaaggagcgggggctagggcggtgggaagtgtaggggtcacgctgggcgtaaccaccacacccgccgcgcttaatggggcgctacagggcgcgtggggatgatccactagtacggattagaagccgccgagcgggtgacagccctccgaaggaagactctcctccgtgcgtcctcgtcttcaccggtcgcgttcctgaaacgcagatgtgcctcgcgccgcactgctccgaacaataaagattctacaatactagcttttatggttatgaagaggaaaaattggcagtaacctggccccacaaaccttcaaatgaacgaatcaaattaacaaccataggatgataatgcgattagttttttagccttatttctggggtaattaatcagcgaagcgatgatttttgatctattaacagatatataaatgcaaaaactgcataaccactttaactaatactttcaacattttcggtttgtattacttcttattcaaatgtaataaaagtatcaacaaaaaattgttaatatacctctatactttaacgtcaaggagaaaaaaccccggatcggactactagcagctgtaatacgactcactatagggaatattaagcttaaacaatggcgacaattcaaatcaatgaaggtaatccatttatcttgggtatggggattagtaaccctgacaattatattactacagaaaagttcgatgaaactatctcaaaatatattgtcgctgatgatatggtagacaaggctaaagcactaattaacaatatttgtatcgaaggacgtcatttgagtagggactttacacacatagattcatcttacttattaagacgtcaccagacaataggcgaggtcaataaagtttatatcgtcgacgcactgaagttaactgagattagttgtcttaaggctattcaggaatgggggggttcaccaaaggatttgactcatttcgttactgcaacatgtaccggacagatggttccagatattaacgtacaactgatacctaccttggggttaaacgaggacatccacagagtgagctctaacttcaacggctgttgtgccggttacactactatgcgtatagctactgatttggcaagagctaataagaaccacagggtgctggtctgttgcaccgaattgtgcagtcaccaagttcccacgtctaaggatttcgatattgttattgcttccttcctatttggggatggctctgcggcctatgttatggggtcagagcttagagagaatgaaaaaccattattcgaagttatagggacacataccgctgtgttgcctaacacacaacatttgatgacatacgcaatcacttctatcggctgggatatgcatctggatcccttattgggccctacagtttcaaaaaattctaaagagtttatcaggaaaatggttgaggaaaaatgcaacgaaaatgccatccctacagatttggtaggtgaatgtgaatatttgattcaccctggtggtccgggtattataagaggtatttgtaaatcattgggtattacagaacagcacgctagacattcctggaatatacttaagaagtatggaaatatgtctagtgccagtgttctatttacaatgaattcagctaggtatgacactgtggctaaaccttattcgatagggattgcaatgggtcctggtttggttgttgagggggttgttttaaaaaatcattacatgaataataataactaactcgagcatgcatctagagggccgcatcatgtaattagttatgtcacgcttacattcacgccctccccccacatccgctctaaccgaaaaggaaggagttagacaacctgaagtctaggtccctatttatttttttatagttatgttagtattaagaacgttatttatatttcaaatttttcttttttttctgtacagacgcgtgtacgcatgtaacattatactgaaaaccttgcttgagaaggttttgggacgctcgaaggctttaatttgcggccctgcattaatgaatcggccaacgcgcggggagaggcggtttgcgtattgggcgctcttccgcttcctcgctcactgactcgctgcgctcggtcgttcggctgcggcgagcggtatcagctcactcaaaggcggtaatacggttatccacagaatcaggggataacgcaggaaagaacatgtgagcaaaaggccagcaaaagcccaggaaccgtaaaaaggccgcgttgctggcgtttttccataggctccgcccccctgacgagcatcacaaaaatcgacgctcaagtcagaggtggcgaaacccgacaggactataaagataccaggcgtttccccctggaagctccctcgtgcgctctcctgttccgaccctgccgcttaccggatacctgtccgcctttctcccttcgggaagcgtggcgctttctcatagctcacgctgtaggtatctcagttcggtgtaggtcgttcgctccaagctgggctgtgtgcacgaaccccccgttcagcccgaccgctgcgccttatccggtaactatcgtcttgagtccaacccggtaagacacgacttatcgccactggcagcagccactggtaacaggattagcagagcgaggtatgtaggcggtgctacagagttcttgaagtggtggcctaactacggctacactagaaggacagtatttggtatctgcgctctgctgaagccagttaccttcggaaaaagagttggtagctcttgatccggcaaacaaaccaccgctggtagcggtggtttttttgtttgcaagcagcagattacgcgcagaaaaaaaggatctcaagaagatcctttgatcttttctacggggtctgacgctcagtggaacgaaaactcacgttaagggattttggtcatgagattatcaaaaaggatcttcacctagatccttttaaattaaaaatgaagttttaaatcaatctaaagtatatatgagtaaacttggtctgacagttaccaatgcttaatcagtgaggcacctatctcagcgatctgtctatttcgttcatccatagttgcctgactccccgtcgtgtagataactacgatacgggagcgcttaccatctggccccagtgctgcaatgataccgcgagacccacgctcaccggctccagatttatcagcaataaaccagccagccggaagggccgagcgcagaagtggtcctgcaactttatccgcctccattcagtctattaattgttgccgggaagctagagtaagtagttcgccagttaatagtttgcgcaacgttgttggcattgctacaggcatcgtggtgtcactctcgtcgtttggtatggcttcattcagctccggttcccaacgatcaaggcgagttacatgatcccccatgttgtgcaaaaaagcggttagctccttcggtcctccgatcgttgtcagaagtaagttggccgcagtgttatcactcatggttatggcagcactgcataattctcttactgtcatgccatccgtaagatgcttttctgtgactggtgagtactcaaccaagtcattctgagaatagtgtatgcggcgaccgagttgctcttgcccggcgtcaatacgggataatagtgtatcacatagcagaactttaaaagtgctcatcattggaaaacgttcttcggggcgaaaactctcaaggatcttaccgctgttgagatccagttcgatgtaacccactcgtgcacccaactgatcttcagcatcttttactttcaccagcgtttctgggtgagcaaaaacaggaaggcaaaatgccgcaaaaaagggaataagggcgacacggaaatgttgaatactcatactcttcctttttcaatgggtaataactgatataattaaattgaagctctaatttgtgagtttagtatacatgcatttacttataatacagttttttagttttgctggccgcatcttctcaaatatgcttcccagcctgcttttctgtaacgttcaccctctaccttagcatcccttccctttgcaaatagtcctcttccaacaataataatgtcagatcctgtagagaccacatcatccacggttctatactgttgacccaatgcgtctcccttgtcatctaaacccacaccgggtgtcataatcaaccaatcgtaaccttcatctcttccacccatgtctctttgagcaataaagccgataacaaaatctttgtcgctcttcgcaatgtcaacagtacccttagtatattctccagtagatagggagcccttgcatgacaattctgctaacatcaaaaggcctctaggttcctttgttacttcttctgccgcctgcttcaaaccgctaacaatacctgggcccaccacaccgtgtgcattcgtaatgtctgcccattctgctattctgtatacacccgcagagtactgcaatttgactgtattaccaatgtcagcaaattttctgtcttcg

SEQ ID NO: 400 - DNA, 7099 bp, Artificial Sequence
  PLAS499
aagagtaaaaaattgtacttggcggataatgcctttagcggcttaactgtgccctccatggaaaaatcagtcaagatatccacatgtgtttttagtaaacaaattttgggacctaatgcttcaactaactccagtaattccttggtggtacgaacatccaatgaagcacacaagtttgtttgcttttcgtgcatgatattaaatagcttggcagcaacaggactaggatgagtagcagcacgttccttatatgtagctttcgacatgatttatcttcgtttcctgcaggtttttgttctgtgcagttgggttaagaatactgggcaatttcatgtttcttcaacactacatatgcgtatatataccaatctaagtctgtgctccttccttcgttcttccttctgttcggagattaccgaatcaaaaaaatttcaaagaaaccgaaatcaaaaaaaagaataaaaaaaaaatgatgaattgaattgaaaagctagcttatcgatgataagctgtcaaagatgagaattaattccacggactatagactatactagatactccgtctactgtacgatacacttccgctcaggtccttgtcctttaacgaggccttaccactcttttgttactctattgatccagctcagcaaaggcagtgtgatctaagattctatcttcgcgatgtagtaaaactagctagaccgagaaagagactagaaatgcaaaaggcacttctacaatggctgccatcattattatccgatgtgacgctgcagcttctcaatgatattcgaatacgctttgaggagatacagcctaatatccgacaaactgttttacagatttacgatcgtacttgttacccatcattgaattttgaacatccgaacctgggagttttccctgaaacagatagtatatttgaacctgtataataatatatagtctagcgctttacggaagacaatgtatgtatttcggttcctggagaaactattgcatctattgcataggtaatcttgcacgtcgcatccccggttcattttctgcgtttccatcttgcacttcaatagcatatctttgttaacgaagcatctgtgcttcattttgtagaacaaaaatgcaacgcgagagcgctaatttttcaaacaaagaatctgagctgcatttttacagaacagaaatgcaacgcgaaagcgctattttaccaacgaagaatctgtgcttcatttttgtaaaacaaaaatgcaacgcgacgagagcgctaatttttcaaacaaagaatctgagctgcatttttacagaacagaaatgcaacgcgagagcgctattttaccaacaaagaatctatacttcttttttgttctacaaaaatgcatcccgagagcgctatttttctaacaaagcatcttagattactttttttctcctttgtgcgctctataatgcagtctcttgataactttttgcactgtaggtccgttaaggttagaagaaggctactttggtgtctattttctcttccataaaaaaagcctgactccacttcccgcgtttactgattactagcgaagctgcgggtgcattttttcaagataaaggcatccccgattatattctataccgatgtggattgcgcatactttgtgaacagaaagtgatagcgttgatgattcttcattggtcagaaaattatgaacggtttcttctattttgtctctatatactacgtataggaaatgtttacattttcgtattgttttcgattcactctatgaatagttcttactacaatttttttgtctaaagagtaatactagagataaacataaaaaatgtagaggtcgagtttagatgcaagttcaaggagcgaaaggtggatgggtaggttatatagggatatagcacagagatatatagcaaagagatacttttgagcaatgtttgtggaagcggtattcgcaatgggaagctccaccccggttgataatcagaaaagccccaaaaacaggaagattgtataagcaaatatttaaattgtaaacgttaatattttgttaaaattcgcgttaaatttttgttaaatcagctcattttttaacgaatagcccgaaatcggcaaaatcccttataaatcaaaagaatagaccgagatagggttgagtgttgttccagtttccaacaagagtccactattaaagaacgtggactccaacgtcaaagggcgaaaaagggtctatcagggcgatggcccactacgtgaaccatcaccctaatcaagttttttggggtcgaggtgccgtaaagcagtaaatcggaagggtaaacggatgcccccatttagagcttgacggggaaagccggcgaacgtggcgagaaaggaagggaagaaagcgaaaggagcgggggctagggcggtgggaagtgtaggggtcacgctgggcgtaaccaccacacccgccgcgcttaatggggcgctacagggcgcgtggggatgatccactagtacggattagaagccgccgagcgggtgacagccctccgaaggaagactctcctccgtgcgtcctcgtcttcaccggtcgcgttcctgaaacgcagatgtgcctcgcgccgcactgctccgaacaataaagattctacaatactagcttttatggttatgaagaggaaaaattggcagtaacctggccccacaaaccttcaaatgaacgaatcaaattaacaaccataggatgataatgcgattagttttttagccttatttctggggtaattaatcagcgaagcgatgatttttgatctattaacagatatataaatgcaaaaactgcataaccactttaactaatactttcaacattttcggtttgtattacttcttattcaaatgtaataaaagtatcaacaaaaaattgttaatatacctctatactttaacgtcaaggagaaaaaaccccggatcggactactagcagctgtaatacgactcactatagggaatattaagcttaaacaatggttagtgtttccgaaatacgtaatattcagagagcagaaggtcctgctaccgtgctagcaattggtactgctaatagcttgaattgtgtcgatcagagtgagagaactcaaattaaaaatagacatatgtatttgaccgaggaaatactgaaagaaaaccctaatatgtgtgcctacaaggcaccttcactagatgcaagagaagatatgatgataagagaagtgccaagagttggtaaagaagctgctactaaagctataaaagaatggggccaaccgatgagcaaaattacacatttgattttttgcactacttcaggtgtagcattacctggggttgattacgaactaattgtgttattaggtttggacccttgcgtgaagagatatatgatgtatcatcaagggtgtttcgcaggtggaactgtcttacgtctagctaaagaccttgctgaaaacaacaaggatgcgcgtgtgttgatcgtctgcagtgaaaatactgccgtcacatttcgtggtccttccgaaacggatatggacagccttgtcggccaggcattatttgccgatggagccgctgcaatcattattggaagcgatcctgttccagaagttgaaaagcctatttttgaaatcgtttctacggatcaaaagctagtgcccggttcccatggagccatcggtggattgttgagggaggtaggcctaactttctatcttaataaaagcgtaccagatataatctctcaaaacatcaatgatgcgctaagtaaagctttcgatccattgggaattagtgactataattcaatattctggatcgcacatccaggaggtagggccatccttgaccaagtggagcaaaaaaaagtgaacttaaagccagaaaaaatgaaggctaccagggatgtgttatctaactatggtaatatgtcatcggcatgcgtttttttcattatggatctaatgagaaaacaatctttagaaaggggtttaaaaacgacaggtgaaggtttagattggggggttttgtttggtttcggtccaggtttaacaattgagacctcatacaagattagtcctactatgataaatctggaaagaggatggctgggcgacaaaggcatgtttttagcaaacgtcgtcttgatggatgataaaattaactctgttgtcagagtgttgtctggaggaatgaaaaggaaactttcactaggcatcgccctaataggaaataataaagtggtttgcatcagcaagaccttggcgctattttgcattcacatcctgaagaaaatcggaattccctaactcgagcatgcatctagagggccgcatcatgtaattagttatgtcacgcttacattcacgccctccccccacatccgctctaaccgaaaaggaaggagttagacaacctgaagtctaggtccctatttatttttttatagttatgttagtattaagaacgttatttatatttcaaatttttcttttttttctgtacagacgcgtgtacgcatgtaacattatactgaaaaccttgcttgagaaggttttgggacgctcgaaggctttaatttgcggccctgcattaatgaatcggccaacgcgcggggagaggcggtttgcgtattgggcgctcttccgcttcctcgctcactgactcgctgcgctcggtcgttcggctgcggcgagcggtatcagctcactcaaaggcggtaatacggttatccacagaatcaggggataacgcaggaaagaacatgtgagcaaaaggccagcaaaagcccaggaaccgtaaaaaggccgcgttgctggcgtttttccataggctccgcccccctgacgagcatcacaaaaatcgacgctcaagtcagaggtggcgaaacccgacaggactataaagataccaggcgtttccccctggaagctccctcgtgcgctctcctgttccgaccctgccgcttaccggatacctgtccgcctttctcccttcgggaagcgtggcgctttctcatagctcacgctgtaggtatctcagttcggtgtaggtcgttcgctccaagctgggctgtgtgcacgaaccccccgttcagcccgaccgctgcgccttatccggtaactatcgtcttgagtccaacccggtaagacacgacttatcgccactggcagcagccactggtaacaggattagcagagcgaggtatgtaggcggtgctacagagttcttgaagtggtggcctaactacggctacactagaaggacagtatttggtatctgcgctctgctgaagccagttaccttcggaaaaagagttggtagctcttgatccggcaaacaaaccaccgctggtagcggtggtttttttgtttgcaagcagcagattacgcgcagaaaaaaaggatctcaagaagatcctttgatcttttctacggggtctgacgctcagtggaacgaaaactcacgttaagggattttggtcatgagattatcaaaaaggatcttcacctagatccttttaaattaaaaatgaagttttaaatcaatctaaagtatatatgagtaaacttggtctgacagttaccaatgcttaatcagtgaggcacctatctcagcgatctgtctatttcgttcatccatagttgcctgactccccgtcgtgtagataactacgatacgggagcgcttaccatctggccccagtgctgcaatgataccgcgagacccacgctcaccggctccagatttatcagcaataaaccagccagccggaagggccgagcgcagaagtggtcctgcaactttatccgcctccattcagtctattaattgttgccgggaagctagagtaagtagttcgccagttaatagtttgcgcaacgttgttggcattgctacaggcatcgtggtgtcactctcgtcgtttggtatggcttcattcagctccggttcccaacgatcaaggcgagttacatgatcccccatgttgtgcaaaaaagcggttagctccttcggtcctccgatcgttgtcagaagtaagttggccgcagtgttatcactcatggttatggcagcactgcataattctcttactgtcatgccatccgtaagatgcttttctgtgactggtgagtactcaaccaagtcattctgagaatagtgtatgcggcgaccgagttgctcttgcccggcgtcaatacgggataatagtgtatcacatagcagaactttaaaagtgctcatcattggaaaacgttcttcggggcgaaaactctcaaggatcttaccgctgttgagatccagttcgatgtaacccactcgtgcacccaactgatcttcagcatcttttactttcaccagcgtttctgggtgagcaaaaacaggaaggcaaaatgccgcaaaaaagggaataagggcgacacggaaatgttgaatactcatactcttcctttttcaatgggtaataactgatataattaaattgaagctctaatttgtgagtttagtatacatgcatttacttataatacagttttttagttttgctggccgcatcttctcaaatatgcttcccagcctgcttttctgtaacgttcaccctctaccttagcatcccttccctttgcaaatagtcctcttccaacaataataatgtcagatcctgtagagaccacatcatccacggttctatactgttgacccaatgcgtctcccttgtcatctaaacccacaccgggtgtcataatcaaccaatcgtaaccttcatctcttccacccatgtctctttgagcaataaagccgataacaaaatctttgtcgctcttcgcaatgtcaacagtacccttagtatattctccagtagatagggagcccttgcatgacaattctgctaacatcaaaaggcctctaggttcctttgttacttcttctgccgcctgcttcaaaccgctaacaatacctgggcccaccacaccgtgtgcattcgtaatgtctgcccattctgctattctgtatacacccgcagagtactgcaatttgactgtattaccaatgtcagcaaattttctgtcttcg

SEQ ID NO: 401 - DNA, 6919 bp, Artificial Sequence
  PLAS500
aagagtaaaaaattgtacttggcggataatgcctttagcggcttaactgtgccctccatggaaaaatcagtcaagatatccacatgtgtttttagtaaacaaattttgggacctaatgcttcaactaactccagtaattccttggtggtacgaacatccaatgaagcacacaagtttgtttgcttttcgtgcatgatattaaatagcttggcagcaacaggactaggatgagtagcagcacgttccttatatgtagctttcgacatgatttatcttcgtttcctgcaggtttttgttctgtgcagttgggttaagaatactgggcaatttcatgtttcttcaacactacatatgcgtatatataccaatctaagtctgtgctccttccttcgttcttccttctgttcggagattaccgaatcaaaaaaatttcaaagaaaccgaaatcaaaaaaaagaataaaaaaaaaatgatgaattgaattgaaaagctagcttatcgatgataagctgtcaaagatgagaattaattccacggactatagactatactagatactccgtctactgtacgatacacttccgctcaggtccttgtcctttaacgaggccttaccactcttttgttactctattgatccagctcagcaaaggcagtgtgatctaagattctatcttcgcgatgtagtaaaactagctagaccgagaaagagactagaaatgcaaaaggcacttctacaatggctgccatcattattatccgatgtgacgctgcagcttctcaatgatattcgaatacgctttgaggagatacagcctaatatccgacaaactgttttacagatttacgatcgtacttgttacccatcattgaattttgaacatccgaacctgggagttttccctgaaacagatagtatatttgaacctgtataataatatatagtctagcgctttacggaagacaatgtatgtatttcggttcctggagaaactattgcatctattgcataggtaatcttgcacgtcgcatccccggttcattttctgcgtttccatcttgcacttcaatagcatatctttgttaacgaagcatctgtgcttcattttgtagaacaaaaatgcaacgcgagagcgctaatttttcaaacaaagaatctgagctgcatttttacagaacagaaatgcaacgcgaaagcgctattttaccaacgaagaatctgtgcttcatttttgtaaaacaaaaatgcaacgcgacgagagcgctaatttttcaaacaaagaatctgagctgcatttttacagaacagaaatgcaacgcgagagcgctattttaccaacaaagaatctatacttcttttttgttctacaaaaatgcatcccgagagcgctatttttctaacaaagcatcttagattactttttttctcctttgtgcgctctataatgcagtctcttgataactttttgcactgtaggtccgttaaggttagaagaaggctactttggtgtctattttctcttccataaaaaaagcctgactccacttcccgcgtttactgattactagcgaagctgcgggtgcattttttcaagataaaggcatccccgattatattctataccgatgtggattgcgcatactttgtgaacagaaagtgatagcgttgatgattcttcattggtcagaaaattatgaacggtttcttctattttgtctctatatactacgtataggaaatgtttacattttcgtattgttttcgattcactctatgaatagttcttactacaatttttttgtctaaagagtaatactagagataaacataaaaaatgtagaggtcgagtttagatgcaagttcaaggagcgaaaggtggatgggtaggttatatagggatatagcacagagatatatagcaaagagatacttttgagcaatgtttgtggaagcggtattcgcaatgggaagctccaccccggttgataatcagaaaagccccaaaaacaggaagattgtataagcaaatatttaaattgtaaacgttaatattttgttaaaattcgcgttaaatttttgttaaatcagctcattttttaacgaatagcccgaaatcggcaaaatcccttataaatcaaaagaatagaccgagatagggttgagtgttgttccagtttccaacaagagtccactattaaagaacgtggactccaacgtcaaagggcgaaaaagggtctatcagggcgatggcccactacgtgaaccatcaccctaatcaagttttttggggtcgaggtgccgtaaagcagtaaatcggaagggtaaacggatgcccccatttagagcttgacggggaaagccggcgaacgtggcgagaaaggaagggaagaaagcgaaaggagcgggggctagggcggtgggaagtgtaggggtcacgctgggcgtaaccaccacacccgccgcgcttaatggggcgctacagggcgcgtggggatgatccactagtacggattagaagccgccgagcgggtgacagccctccgaaggaagactctcctccgtgcgtcctcgtcttcaccggtcgcgttcctgaaacgcagatgtgcctcgcgccgcactgctccgaacaataaagattctacaatactagcttttatggttatgaagaggaaaaattggcagtaacctggccccacaaaccttcaaatgaacgaatcaaattaacaaccataggatgataatgcgattagttttttagccttatttctggggtaattaatcagcgaagcgatgatttttgatctattaacagatatataaatgcaaaaactgcataaccactttaactaatactttcaacattttcggtttgtattacttcttattcaaatgtaataaaagtatcaacaaaaaattgttaatatacctctatactttaacgtcaaggagaaaaaaccccggatcggactactagcagctgtaatacgactcactatagggaatattaagcttaaacaatggtcagtgtgtccggtactaggaatattcaaagagccgaaggtccagccaccgtattagctattggtacagccaacccatctaactgcgtcgaccagtcgacatacgcagattattatttcagagtgactgactcggaacatatgacggatctaaagaaaaaatttcaaagaatatgtgaacgtacgcaaataaagaacaggcatatgtatttaactgaagaaatattaaaggaaaatccaaacatgtgtgcttataaagcgccatctttagatgctagagaagacatgatgatcagagaggtccctagggttggcaaggaagctgctactaaagctatcaaagagtggggtcaacctatgagcaaaatcactcatttaattttttgtactacttctggtgttgccttacctggcgtagattatgagttgatagttctactaggtctagatccttgcgttaaaagatacatgatgtatcaccaaggttgttttgccggcggtacagttttaagattagctaaggacttggctgagaacaataaggatgctagggttttgatcgtatgttccgaaaacaccgctgtgacttttaggggtccgtcggaaacagatatggattcacttgttggccaagccttgtttgccgatggagctgctgcaattataatcggctctgatccagtccccgaagtcgaaaaacctatatttgaaattgtttccaccgatcaaaagttggtaccaggttcacatggagcaataggtggtcttttacgtgaagtgggtctgactttttacctaaacaaaagtgtcccagacattataagccaaaacatcaacgacgcgttgtcgaaagcatttgaccctctaggtataagcgattataacagtattttttggatcgctcaccctgggggaagggcaatcttagatcaagttgaacaaaaggtcaaccttaaacctgagaaaatgaaagcaacaagggatgtgttaagtaattatggcaatatgtcttcagcttgtgtcttttttattatggatttaatgagaaagaagtcattggaggaaggacttaagactactggggagggcttagattggggcgtcttgttcggtttcggaccaggactttgactcgagcatgcatctagagggccgcatcatgtaattagttatgtcacgcttacattcacgccctccccccacatccgctctaaccgaaaaggaaggagttagacaacctgaagtctaggtccctatttatttttttatagttatgttagtattaagaacgttatttatatttcaaatttttcttttttttctgtacagacgcgtgtacgcatgtaacattatactgaaaaccttgcttgagaaggttttgggacgctcgaaggctttaatttgcggccctgcattaatgaatcggccaacgcgcggggagaggcggtttgcgtattgggcgctcttccgcttcctcgctcactgactcgctgcgctcggtcgttcggctgcggcgagcggtatcagctcactcaaaggcggtaatacggttatccacagaatcaggggataacgcaggaaagaacatgtgagcaaaaggccagcaaaagcccaggaaccgtaaaaaggccgcgttgctggcgtttttccataggctccgcccccctgacgagcatcacaaaaatcgacgctcaagtcagaggtggcgaaacccgacaggactataaagataccaggcgtttccccctggaagctccctcgtgcgctctcctgttccgaccctgccgcttaccggatacctgtccgcctttctcccttcgggaagcgtggcgctttctcatagctcacgctgtaggtatctcagttcggtgtaggtcgttcgctccaagctgggctgtgtgcacgaaccccccgttcagcccgaccgctgcgccttatccggtaactatcgtcttgagtccaacccggtaagacacgacttatcgccactggcagcagccactggtaacaggattagcagagcgaggtatgtaggcggtgctacagagttcttgaagtggtggcctaactacggctacactagaaggacagtatttggtatctgcgctctgctgaagccagttaccttcggaaaaagagttggtagctcttgatccggcaaacaaaccaccgctggtagcggtggtttttttgtttgcaagcagcagattacgcgcagaaaaaaaggatctcaagaagatcctttgatcttttctacggggtctgacgctcagtggaacgaaaactcacgttaagggattttggtcatgagattatcaaaaaggatcttcacctagatccttttaaattaaaaatgaagttttaaatcaatctaaagtatatatgagtaaacttggtctgacagttaccaatgcttaatcagtgaggcacctatctcagcgatctgtctatttcgttcatccatagttgcctgactccccgtcgtgtagataactacgatacgggagcgcttaccatctggccccagtgctgcaatgataccgcgagacccacgctcaccggctccagatttatcagcaataaaccagccagccggaagggccgagcgcagaagtggtcctgcaactttatccgcctccattcagtctattaattgttgccgggaagctagagtaagtagttcgccagttaatagtttgcgcaacgttgttggcattgctacaggcatcgtggtgtcactctcgtcgtttggtatggcttcattcagctccggttcccaacgatcaaggcgagttacatgatcccccatgttgtgcaaaaaagcggttagctccttcggtcctccgatcgttgtcagaagtaagttggccgcagtgttatcactcatggttatggcagcactgcataattctcttactgtcatgccatccgtaagatgcttttctgtgactggtgagtactcaaccaagtcattctgagaatagtgtatgcggcgaccgagttgctcttgcccggcgtcaatacgggataatagtgtatcacatagcagaactttaaaagtgctcatcattggaaaacgttcttcggggcgaaaactctcaaggatcttaccgctgttgagatccagttcgatgtaacccactcgtgcacccaactgatcttcagcatcttttactttcaccagcgtttctgggtgagcaaaaacaggaaggcaaaatgccgcaaaaaagggaataagggcgacacggaaatgttgaatactcatactcttcctttttcaatgggtaataactgatataattaaattgaagctctaatttgtgagtttagtatacatgcatttacttataatacagttttttagttttgctggccgcatcttctcaaatatgcttcccagcctgcttttctgtaacgttcaccctctaccttagcatcccttccctttgcaaatagtcctcttccaacaataataatgtcagatcctgtagagaccacatcatccacggttctatactgttgacccaatgcgtctcccttgtcatctaaacccacaccgggtgtcataatcaaccaatcgtaaccttcatctcttccacccatgtctctttgagcaataaagccgataacaaaatctttgtcgctcttcgcaatgtcaacagtacccttagtatattctccagtagatagggagcccttgcatgacaattctgctaacatcaaaaggcctctaggttcctttgttacttcttctgccgcctgcttcaaaccgctaacaatacctgggcccaccacaccgtgtgcattcgtaatgtctgcccattctgctattctgtatacacccgcagagtactgcaatttgactgtattaccaatgtcagcaaattttctgtcttcg

SEQ ID NO: 402 - DNA, 7045 bp, Artificial Sequence
  PLAS501
aagagtaaaaaattgtacttggcggataatgcctttagcggcttaactgtgccctccatggaaaaatcagtcaagatatccacatgtgtttttagtaaacaaattttgggacctaatgcttcaactaactccagtaattccttggtggtacgaacatccaatgaagcacacaagtttgtttgcttttcgtgcatgatattaaatagcttggcagcaacaggactaggatgagtagcagcacgttccttatatgtagctttcgacatgatttatcttcgtttcctgcaggtttttgttctgtgcagttgggttaagaatactgggcaatttcatgtttcttcaacactacatatgcgtatatataccaatctaagtctgtgctccttccttcgttcttccttctgttcggagattaccgaatcaaaaaaatttcaaagaaaccgaaatcaaaaaaaagaataaaaaaaaaatgatgaattgaattgaaaagctagcttatcgatgataagctgtcaaagatgagaattaattccacggactatagactatactagatactccgtctactgtacgatacacttccgctcaggtccttgtcctttaacgaggccttaccactcttttgttactctattgatccagctcagcaaaggcagtgtgatctaagattctatcttcgcgatgtagtaaaactagctagaccgagaaagagactagaaatgcaaaaggcacttctacaatggctgccatcattattatccgatgtgacgctgcagcttctcaatgatattcgaatacgctttgaggagatacagcctaatatccgacaaactgttttacagatttacgatcgtacttgttacccatcattgaattttgaacatccgaacctgggagttttccctgaaacagatagtatatttgaacctgtataataatatatagtctagcgctttacggaagacaatgtatgtatttcggttcctggagaaactattgcatctattgcataggtaatcttgcacgtcgcatccccggttcattttctgcgtttccatcttgcacttcaatagcatatctttgttaacgaagcatctgtgcttcattttgtagaacaaaaatgcaacgcgagagcgctaatttttcaaacaaagaatctgagctgcatttttacagaacagaaatgcaacgcgaaagcgctattttaccaacgaagaatctgtgcttcatttttgtaaaacaaaaatgcaacgcgacgagagcgctaatttttcaaacaaagaatctgagctgcatttttacagaacagaaatgcaacgcgagagcgctattttaccaacaaagaatctatacttcttttttgttctacaaaaatgcatcccgagagcgctatttttctaacaaagcatcttagattactttttttctcctttgtgcgctctataatgcagtctcttgataactttttgcactgtaggtccgttaaggttagaagaaggctactttggtgtctattttctcttccataaaaaaagcctgactccacttcccgcgtttactgattactagcgaagctgcgggtgcattttttcaagataaaggcatccccgattatattctataccgatgtggattgcgcatactttgtgaacagaaagtgatagcgttgatgattcttcattggtcagaaaattatgaacggtttcttctattttgtctctatatactacgtataggaaatgtttacattttcgtattgttttcgattcactctatgaatagttcttactacaatttttttgtctaaagagtaatactagagataaacataaaaaatgtagaggtcgagtttagatgcaagttcaaggagcgaaaggtggatgggtaggttatatagggatatagcacagagatatatagcaaagagatacttttgagcaatgtttgtggaagcggtattcgcaatgggaagctccaccccggttgataatcagaaaagccccaaaaacaggaagattgtataagcaaatatttaaattgtaaacgttaatattttgttaaaattcgcgttaaatttttgttaaatcagctcattttttaacgaatagcccgaaatcggcaaaatcccttataaatcaaaagaatagaccgagatagggttgagtgttgttccagtttccaacaagagtccactattaaagaacgtggactccaacgtcaaagggcgaaaaagggtctatcagggcgatggcccactacgtgaaccatcaccctaatcaagttttttggggtcgaggtgccgtaaagcagtaaatcggaagggtaaacggatgcccccatttagagcttgacggggaaagccggcgaacgtggcgagaaaggaagggaagaaagcgaaaggagcgggggctagggcggtgggaagtgtaggggtcacgctgggcgtaaccaccacacccgccgcgcttaatggggcgctacagggcgcgtggggatgatccactagtacggattagaagccgccgagcgggtgacagccctccgaaggaagactctcctccgtgcgtcctcgtcttcaccggtcgcgttcctgaaacgcagatgtgcctcgcgccgcactgctccgaacaataaagattctacaatactagcttttatggttatgaagaggaaaaattggcagtaacctggccccacaaaccttcaaatgaacgaatcaaattaacaaccataggatgataatgcgattagttttttagccttatttctggggtaattaatcagcgaagcgatgatttttgatctattaacagatatataaatgcaaaaactgcataaccactttaactaatactttcaacattttcggtttgtattacttcttattcaaatgtaataaaagtatcaacaaaaaattgttaatatacctctatactttaacgtcaaggagaaaaaaccccggatcggactactagcagctgtaatacgactcactatagggaatattaagcttaaacaatggcaacaagggtccttagttctcaagaaaatttcgaaaaactaatggcagatttagcaagacctaatggtcacgtatactcccagtcacaaagccagtcaggttcgggccagaatggtgcggggacgtcaatagtggcgaaaaataccgcttctattttggctatcggtaaagctttacctccaaacaggatctgccagtctacgtatactgatttctattttagagtaactcactgctcgcataaaacagaattgaaaaaccgtatgcaacgtatttgtgacaaatccgggattaatactaggtatttgttattggatgaggaagccctaaaggaacattcggaattctatactccagggcaagctagtatagaacagaggcacgatttgttagaagaagctgttcctaaactagccgctcaagctgctgcctctgcgttggaagagtggggaagaccagcttgcgatgttacccacttaatcgtagtaacactatcaggtgtcgcaattcctggcgctgatgtgcgtcttgtgaaattgttgggcttgagagaggatgtttcgagagtgatgttgtatatgctgggctgctatgctggagtgactgccctacgtctggcaaaggatctggcggaaaataatcctgggagtagagtgttaatagcttgctctgaaatgacagcgaccactttcagggcaccctccgaaaagagcatgtacgacattgttggtgcctcattattcggtgatggagcagttggtgtcatagtgggagcgaaaccaaggccaggaattgaaagatctatcttcgagatccattgggctggagtttcattagctccggatacagagcacgttgtgcagggtaagcttaagcccgacggtctatacttctttttagacaaatctttgcctggtttggtgggaaaacatatagctcccttttgcagatctctgctggatcacgcaccagagaatctgaatttagggtttaatgaagtgttttgggctgttcaccccggcgggcctgctatacttaacactgtggaggaacaacttctgctaaacagtgagaaattgagagcatctagagatgtactagccaattatggtaatgttagtgcatcttctgtattgtatgttctggatgaattaagacatagaccaggtcaggaggaatggggtgctgctttagcattcggcccgggtattacatttgagggtgttttgttgcgtagaaatgtgaatcacagatagctcgagcatgcatctagagggccgcatcatgtaattagttatgtcacgcttacattcacgccctccccccacatccgctctaaccgaaaaggaaggagttagacaacctgaagtctaggtccctatttatttttttatagttatgttagtattaagaacgttatttatatttcaaatttttcttttttttctgtacagacgcgtgtacgcatgtaacattatactgaaaaccttgcttgagaaggttttgggacgctcgaaggctttaatttgcggccctgcattaatgaatcggccaacgcgcggggagaggcggtttgcgtattgggcgctcttccgcttcctcgctcactgactcgctgcgctcggtcgttcggctgcggcgagcggtatcagctcactcaaaggcggtaatacggttatccacagaatcaggggataacgcaggaaagaacatgtgagcaaaaggccagcaaaagcccaggaaccgtaaaaaggccgcgttgctggcgtttttccataggctccgcccccctgacgagcatcacaaaaatcgacgctcaagtcagaggtggcgaaacccgacaggactataaagataccaggcgtttccccctggaagctccctcgtgcgctctcctgttccgaccctgccgcttaccggatacctgtccgcctttctcccttcgggaagcgtggcgctttctcatagctcacgctgtaggtatctcagttcggtgtaggtcgttcgctccaagctgggctgtgtgcacgaaccccccgttcagcccgaccgctgcgccttatccggtaactatcgtcttgagtccaacccggtaagacacgacttatcgccactggcagcagccactggtaacaggattagcagagcgaggtatgtaggcggtgctacagagttcttgaagtggtggcctaactacggctacactagaaggacagtatttggtatctgcgctctgctgaagccagttaccttcggaaaaagagttggtagctcttgatccggcaaacaaaccaccgctggtagcggtggtttttttgtttgcaagcagcagattacgcgcagaaaaaaaggatctcaagaagatcctttgatcttttctacggggtctgacgctcagtggaacgaaaactcacgttaagggattttggtcatgagattatcaaaaaggatcttcacctagatccttttaaattaaaaatgaagttttaaatcaatctaaagtatatatgagtaaacttggtctgacagttaccaatgcttaatcagtgaggcacctatctcagcgatctgtctatttcgttcatccatagttgcctgactccccgtcgtgtagataactacgatacgggagcgcttaccatctggccccagtgctgcaatgataccgcgagacccacgctcaccggctccagatttatcagcaataaaccagccagccggaagggccgagcgcagaagtggtcctgcaactttatccgcctccattcagtctattaattgttgccgggaagctagagtaagtagttcgccagttaatagtttgcgcaacgttgttggcattgctacaggcatcgtggtgtcactctcgtcgtttggtatggcttcattcagctccggttcccaacgatcaaggcgagttacatgatcccccatgttgtgcaaaaaagcggttagctccttcggtcctccgatcgttgtcagaagtaagttggccgcagtgttatcactcatggttatggcagcactgcataattctcttactgtcatgccatccgtaagatgcttttctgtgactggtgagtactcaaccaagtcattctgagaatagtgtatgcggcgaccgagttgctcttgcccggcgtcaatacgggataatagtgtatcacatagcagaactttaaaagtgctcatcattggaaaacgttcttcggggcgaaaactctcaaggatcttaccgctgttgagatccagttcgatgtaacccactcgtgcacccaactgatcttcagcatcttttactttcaccagcgtttctgggtgagcaaaaacaggaaggcaaaatgccgcaaaaaagggaataagggcgacacggaaatgttgaatactcatactcttcctttttcaatgggtaataactgatataattaaattgaagctctaatttgtgagtttagtatacatgcatttacttataatacagttttttagttttgctggccgcatcttctcaaatatgcttcccagcctgcttttctgtaacgttcaccctctaccttagcatcccttccctttgcaaatagtcctcttccaacaataataatgtcagatcctgtagagaccacatcatccacggttctatactgttgacccaatgcgtctcccttgtcatctaaacccacaccgggtgtcataatcaaccaatcgtaaccttcatctcttccacccatgtctctttgagcaataaagccgataacaaaatctttgtcgctcttcgcaatgtcaacagtacccttagtatattctccagtagatagggagcccttgcatgacaattctgctaacatcaaaaggcctctaggttcctttgttacttcttctgccgcctgcttcaaaccgctaacaatacctgggcccaccacaccgtgtgcattcgtaatgtctgcccattctgctattctgtatacacccgcagagtactgcaatttgactgtattaccaatgtcagcaaattttctgtcttcg

SEQ ID NO: 403 - DNA, 6964 bp, Artificial Sequence
  PLAS502
aagagtaaaaaattgtacttggcggataatgcctttagcggcttaactgtgccctccatggaaaaatcagtcaagatatccacatgtgtttttagtaaacaaattttgggacctaatgcttcaactaactccagtaattccttggtggtacgaacatccaatgaagcacacaagtttgtttgcttttcgtgcatgatattaaatagcttggcagcaacaggactaggatgagtagcagcacgttccttatatgtagctttcgacatgatttatcttcgtttcctgcaggtttttgttctgtgcagttgggttaagaatactgggcaatttcatgtttcttcaacactacatatgcgtatatataccaatctaagtctgtgctccttccttcgttcttccttctgttcggagattaccgaatcaaaaaaatttcaaagaaaccgaaatcaaaaaaaagaataaaaaaaaaatgatgaattgaattgaaaagctagcttatcgatgataagctgtcaaagatgagaattaattccacggactatagactatactagatactccgtctactgtacgatacacttccgctcaggtccttgtcctttaacgaggccttaccactcttttgttactctattgatccagctcagcaaaggcagtgtgatctaagattctatcttcgcgatgtagtaaaactagctagaccgagaaagagactagaaatgcaaaaggcacttctacaatggctgccatcattattatccgatgtgacgctgcagcttctcaatgatattcgaatacgctttgaggagatacagcctaatatccgacaaactgttttacagatttacgatcgtacttgttacccatcattgaattttgaacatccgaacctgggagttttccctgaaacagatagtatatttgaacctgtataataatatatagtctagcgctttacggaagacaatgtatgtatttcggttcctggagaaactattgcatctattgcataggtaatcttgcacgtcgcatccccggttcattttctgcgtttccatcttgcacttcaatagcatatctttgttaacgaagcatctgtgcttcattttgtagaacaaaaatgcaacgcgagagcgctaatttttcaaacaaagaatctgagctgcatttttacagaacagaaatgcaacgcgaaagcgctattttaccaacgaagaatctgtgcttcatttttgtaaaacaaaaatgcaacgcgacgagagcgctaatttttcaaacaaagaatctgagctgcatttttacagaacagaaatgcaacgcgagagcgctattttaccaacaaagaatctatacttcttttttgttctacaaaaatgcatcccgagagcgctatttttctaacaaagcatcttagattactttttttctcctttgtgcgctctataatgcagtctcttgataactttttgcactgtaggtccgttaaggttagaagaaggctactttggtgtctattttctcttccataaaaaaagcctgactccacttcccgcgtttactgattactagcgaagctgcgggtgcattttttcaagataaaggcatccccgattatattctataccgatgtggattgcgcatactttgtgaacagaaagtgatagcgttgatgattcttcattggtcagaaaattatgaacggtttcttctattttgtctctatatactacgtataggaaatgtttacattttcgtattgttttcgattcactctatgaatagttcttactacaatttttttgtctaaagagtaatactagagataaacataaaaaatgtagaggtcgagtttagatgcaagttcaaggagcgaaaggtggatgggtaggttatatagggatatagcacagagatatatagcaaagagatacttttgagcaatgtttgtggaagcggtattcgcaatgggaagctccaccccggttgataatcagaaaagccccaaaaacaggaagattgtataagcaaatatttaaattgtaaacgttaatattttgttaaaattcgcgttaaatttttgttaaatcagctcattttttaacgaatagcccgaaatcggcaaaatcccttataaatcaaaagaatagaccgagatagggttgagtgttgttccagtttccaacaagagtccactattaaagaacgtggactccaacgtcaaagggcgaaaaagggtctatcagggcgatggcccactacgtgaaccatcaccctaatcaagttttttggggtcgaggtgccgtaaagcagtaaatcggaagggtaaacggatgcccccatttagagcttgacggggaaagccggcgaacgtggcgagaaaggaagggaagaaagcgaaaggagcgggggctagggcggtgggaagtgtaggggtcacgctgggcgtaaccaccacacccgccgcgcttaatggggcgctacagggcgcgtggggatgatccactagtacggattagaagccgccgagcgggtgacagccctccgaaggaagactctcctccgtgcgtcctcgtcttcaccggtcgcgttcctgaaacgcagatgtgcctcgcgccgcactgctccgaacaataaagattctacaatactagcttttatggttatgaagaggaaaaattggcagtaacctggccccacaaaccttcaaatgaacgaatcaaattaacaaccataggatgataatgcgattagttttttagccttatttctggggtaattaatcagcgaagcgatgatttttgatctattaacagatatataaatgcaaaaactgcataaccactttaactaatactttcaacattttcggtttgtattacttcttattcaaatgtaataaaagtatcaacaaaaaattgttaatatacctctatactttaacgtcaaggagaaaaaaccccggatcggactactagcagctgtaatacgactcactatagggaatattaagcttaaacaatggcaagtgttgaggaaattcgtaacgcccaaagggcaaaaggtccagccacaattttggcaattgggactgccactccagatcactgtgtgtatcagagtgactacgcagattactatttcagggtaactaaaagtgagcatatgacagcgttaaagaaaaagtttaacagaatctgtgacaaatccatgattaagaaaagatatattcacctaactgaagaaatgttagaagagcatcctaacattgttgcttatatggcaccaagcctaaatatccgtcaggaaataatcactgcaaaagtacctaaactaggtaaagaagcagccttaaaggctttaaaagaatggggacagcccaaatcaaagattacacacttagtcttttgtacaacaagcggtgttgaaatgccaggcgccgattataaactagccaatttgctgggtctggaaccatcagttagaagggtgatgctatatcatcagggttgctatgcaggtggtactgtactgagaacagccaaggatcttgccgagaataatgcaggtgcaagagtgctagttgttggttctgaaatcacagtggttacgttcaggggcccaagcgaggatgccttagattcgttggtgggtcaagctttgtttggggatggttcggctgccattatagtgggatcggatccagacatcagcatcgaaagacctcttttccagctagtttccgcagcacaaacatttatacccaactccgcaggggccatcgcgggaaacgtcagagaagttggcttgactttccatttatggccaaacgtacctacattgatttcggaagatatagagaagtgcttgacgcaagcgtttgatcctttaggtatatcagactggaactccttattttggattgcacatccaggaggaccagcaatacttgatgccgtagaagcaaaactaaatttagacaagaaaaaattggaagctactagacatgttctgtccgaatatggtaatatgagttccgcatgcgttctattcattttagacgaagtcagaaaaaagtcattaaaaggtgagagagcaactacaggagaaggattggactggggtgtcctatttggatttgggccaggtttgactatagaaaccgtggttcttcattcaatcccaatggtaaccaattgactcgagcatgcatctagagggccgcatcatgtaattagttatgtcacgcttacattcacgccctccccccacatccgctctaaccgaaaaggaaggagttagacaacctgaagtctaggtccctatttatttttttatagttatgttagtattaagaacgttatttatatttcaaatttttcttttttttctgtacagacgcgtgtacgcatgtaacattatactgaaaaccttgcttgagaaggttttgggacgctcgaaggctttaatttgcggccctgcattaatgaatcggccaacgcgcggggagaggcggtttgcgtattgggcgctcttccgcttcctcgctcactgactcgctgcgctcggtcgttcggctgcggcgagcggtatcagctcactcaaaggcggtaatacggttatccacagaatcaggggataacgcaggaaagaacatgtgagcaaaaggccagcaaaagcccaggaaccgtaaaaaggccgcgttgctggcgtttttccataggctccgcccccctgacgagcatcacaaaaatcgacgctcaagtcagaggtggcgaaacccgacaggactataaagataccaggcgtttccccctggaagctccctcgtgcgctctcctgttccgaccctgccgcttaccggatacctgtccgcctttctcccttcgggaagcgtggcgctttctcatagctcacgctgtaggtatctcagttcggtgtaggtcgttcgctccaagctgggctgtgtgcacgaaccccccgttcagcccgaccgctgcgccttatccggtaactatcgtcttgagtccaacccggtaagacacgacttatcgccactggcagcagccactggtaacaggattagcagagcgaggtatgtaggcggtgctacagagttcttgaagtggtggcctaactacggctacactagaaggacagtatttggtatctgcgctctgctgaagccagttaccttcggaaaaagagttggtagctcttgatccggcaaacaaaccaccgctggtagcggtggtttttttgtttgcaagcagcagattacgcgcagaaaaaaaggatctcaagaagatcctttgatcttttctacggggtctgacgctcagtggaacgaaaactcacgttaagggattttggtcatgagattatcaaaaaggatcttcacctagatccttttaaattaaaaatgaagttttaaatcaatctaaagtatatatgagtaaacttggtctgacagttaccaatgcttaatcagtgaggcacctatctcagcgatctgtctatttcgttcatccatagttgcctgactccccgtcgtgtagataactacgatacgggagcgcttaccatctggccccagtgctgcaatgataccgcgagacccacgctcaccggctccagatttatcagcaataaaccagccagccggaagggccgagcgcagaagtggtcctgcaactttatccgcctccattcagtctattaattgttgccgggaagctagagtaagtagttcgccagttaatagtttgcgcaacgttgttggcattgctacaggcatcgtggtgtcactctcgtcgtttggtatggcttcattcagctccggttcccaacgatcaaggcgagttacatgatcccccatgttgtgcaaaaaagcggttagctccttcggtcctccgatcgttgtcagaagtaagttggccgcagtgttatcactcatggttatggcagcactgcataattctcttactgtcatgccatccgtaagatgcttttctgtgactggtgagtactcaaccaagtcattctgagaatagtgtatgcggcgaccgagttgctcttgcccggcgtcaatacgggataatagtgtatcacatagcagaactttaaaagtgctcatcattggaaaacgttcttcggggcgaaaactctcaaggatcttaccgctgttgagatccagttcgatgtaacccactcgtgcacccaactgatcttcagcatcttttactttcaccagcgtttctgggtgagcaaaaacaggaaggcaaaatgccgcaaaaaagggaataagggcgacacggaaatgttgaatactcatactcttcctttttcaatgggtaataactgatataattaaattgaagctctaatttgtgagtttagtatacatgcatttacttataatacagttttttagttttgctggccgcatcttctcaaatatgcttcccagcctgcttttctgtaacgttcaccctctaccttagcatcccttccctttgcaaatagtcctcttccaacaataataatgtcagatcctgtagagaccacatcatccacggttctatactgttgacccaatgcgtctcccttgtcatctaaacccacaccgggtgtcataatcaaccaatcgtaaccttcatctcttccacccatgtctctttgagcaataaagccgataacaaaatctttgtcgctcttcgcaatgtcaacagtacccttagtatattctccagtagatagggagcccttgcatgacaattctgctaacatcaaaaggcctctaggttcctttgttacttcttctgccgcctgcttcaaaccgctaacaatacctgggcccaccacaccgtgtgcattcgtaatgtctgcccattctgctattctgtatacacccgcagagtactgcaatttgactgtattaccaatgtcagcaaattttctgtcttcg

SEQ ID NO: 404 - DNA, 6484 bp, Artificial Sequence
  PLAS400
aagagtaaaaaattgtacttggcggataatgcctttagcggcttaactgtgccctccatggaaaaatcagtcaagatatccacatgtgtttttagtaaacaaattttgggacctaatgcttcaactaactccagtaattccttggtggtacgaacatccaatgaagcacacaagtttgtttgcttttcgtgcatgatattaaatagcttggcagcaacaggactaggatgagtagcagcacgttccttatatgtagctttcgacatgatttatcttcgtttcctgcaggtttttgttctgtgcagttgggttaagaatactgggcaatttcatgtttcttcaacactacatatgcgtatatataccaatctaagtctgtgctccttccttcgttcttccttctgttcggagattaccgaatcaaaaaaatttcaaagaaaccgaaatcaaaaaaaagaataaaaaaaaaatgatgaattgaattgaaaagctagcttatcgatgataagctgtcaaagatgagaattaattccacggactatagactatactagatactccgtctactgtacgatacacttccgctcaggtccttgtcctttaacgaggccttaccactcttttgttactctattgatccagctcagcaaaggcagtgtgatctaagattctatcttcgcgatgtagtaaaactagctagaccgagaaagagactagaaatgcaaaaggcacttctacaatggctgccatcattattatccgatgtgacgctgcagcttctcaatgatattcgaatacgctttgaggagatacagcctaatatccgacaaactgttttacagatttacgatcgtacttgttacccatcattgaattttgaacatccgaacctgggagttttccctgaaacagatagtatatttgaacctgtataataatatatagtctagcgctttacggaagacaatgtatgtatttcggttcctggagaaactattgcatctattgcataggtaatcttgcacgtcgcatccccggttcattttctgcgtttccatcttgcacttcaatagcatatctttgttaacgaagcatctgtgcttcattttgtagaacaaaaatgcaacgcgagagcgctaatttttcaaacaaagaatctgagctgcatttttacagaacagaaatgcaacgcgaaagcgctattttaccaacgaagaatctgtgcttcatttttgtaaaacaaaaatgcaacgcgacgagagcgctaatttttcaaacaaagaatctgagctgcatttttacagaacagaaatgcaacgcgagagcgctattttaccaacaaagaatctatacttcttttttgttctacaaaaatgcatcccgagagcgctatttttctaacaaagcatcttagattactttttttctcctttgtgcgctctataatgcagtctcttgataactttttgcactgtaggtccgttaaggttagaagaaggctactttggtgtctattttctcttccataaaaaaagcctgactccacttcccgcgtttactgattactagcgaagctgcgggtgcattttttcaagataaaggcatccccgattatattctataccgatgtggattgcgcatactttgtgaacagaaagtgatagcgttgatgattcttcattggtcagaaaattatgaacggtttcttctattttgtctctatatactacgtataggaaatgtttacattttcgtattgttttcgattcactctatgaatagttcttactacaatttttttgtctaaagagtaatactagagataaacataaaaaatgtagaggtcgagtttagatgcaagttcaaggagcgaaaggtggatgggtaggttatatagggatatagcacagagatatatagcaaagagatacttttgagcaatgtttgtggaagcggtattcgcaatgggaagctccaccccggttgataatcagaaaagccccaaaaacaggaagattgtataagcaaatatttaaattgtaaacgttaatattttgttaaaattcgcgttaaatttttgttaaatcagctcattttttaacgaatagcccgaaatcggcaaaatcccttataaatcaaaagaatagaccgagatagggttgagtgttgttccagtttccaacaagagtccactattaaagaacgtggactccaacgtcaaagggcgaaaaagggtctatcagggcgatggcccactacgtgaaccatcaccctaatcaagttttttggggtcgaggtgccgtaaagcagtaaatcggaagggtaaacggatgcccccatttagagcttgacggggaaagccggcgaacgtggcgagaaaggaagggaagaaagcgaaaggagcgggggctagggcggtgggaagtgtaggggtcacgctgggcgtaaccaccacacccgccgcgcttaatggggcgctacagggcgcgtggggatgatccactagtacggattagaagccgccgagcgggtgacagccctccgaaggaagactctcctccgtgcgtcctcgtcttcaccggtcgcgttcctgaaacgcagatgtgcctcgcgccgcactgctccgaacaataaagattctacaatactagcttttatggttatgaagaggaaaaattggcagtaacctggccccacaaaccttcaaatgaacgaatcaaattaacaaccataggatgataatgcgattagttttttagccttatttctggggtaattaatcagcgaagcgatgatttttgatctattaacagatatataaatgcaaaaactgcataaccactttaactaatactttcaacattttcggtttgtattacttcttattcaaatgtaataaaagtatcaacaaaaaattgttaatatacctctatactttaacgtcaaggagaaaaaaccccggatcggactactagcagctgtaatacgactcactatagggaatattaagcttaaacaatggtgtctaaaggtgaagccgtcatcaaagaattcatgagattcaaggttcacatggaaggttctatgaatggtcacgaattcgaaattgaaggtgaaggtgagggtagaccatatgaaggtactcaaactgctaagttgaaggttacaaaaggtggtccattgccattctcttgggatattttgtctccacaattcatgtacggttctagagcttttacaaaacacccagctgatatcccagattactacaagcaatcatttccagagggtttcaagtgggaaagagttatgaattttgaagatggtggtgccgttactgttactcaagatacttctttggaagatggcaccttgatctacaaggttaagttgagaggtactaatttcccaccagatggtccagttatgcaaaaaaagactatgggttgggaagctagtactgaaagattatatccagaggatggtgttttgaagggtgatattaagatggccttgagattgaaagacggtggtagatatttggctgatttcaagactacttacaaggccaaaaagccagttcaaatgccaggtgcttataacgttgatagaaagttggatatcacctctcacaacgaagattacaccgttgttgaacagtacgaaagatctgaaggtagacattctactggtggtatggatgagttgtacaagtaactcgagcatgcatctagagggccgcatcatgtaattagttatgtcacgcttacattcacgccctccccccacatccgctctaaccgaaaaggaaggagttagacaacctgaagtctaggtccctatttatttttttatagttatgttagtattaagaacgttatttatatttcaaatttttcttttttttctgtacagacgcgtgtacgcatgtaacattatactgaaaaccttgcttgagaaggttttgggacgctcgaaggctttaatttgcggccctgcattaatgaatcggccaacgcgcggggagaggcggtttgcgtattgggcgctcttccgcttcctcgctcactgactcgctgcgctcggtcgttcggctgcggcgagcggtatcagctcactcaaaggcggtaatacggttatccacagaatcaggggataacgcaggaaagaacatgtgagcaaaaggccagcaaaagcccaggaaccgtaaaaaggccgcgttgctggcgtttttccataggctccgcccccctgacgagcatcacaaaaatcgacgctcaagtcagaggtggcgaaacccgacaggactataaagataccaggcgtttccccctggaagctccctcgtgcgctctcctgttccgaccctgccgcttaccggatacctgtccgcctttctcccttcgggaagcgtggcgctttctcatagctcacgctgtaggtatctcagttcggtgtaggtcgttcgctccaagctgggctgtgtgcacgaaccccccgttcagcccgaccgctgcgccttatccggtaactatcgtcttgagtccaacccggtaagacacgacttatcgccactggcagcagccactggtaacaggattagcagagcgaggtatgtaggcggtgctacagagttcttgaagtggtggcctaactacggctacactagaaggacagtatttggtatctgcgctctgctgaagccagttaccttcggaaaaagagttggtagctcttgatccggcaaacaaaccaccgctggtagcggtggtttttttgtttgcaagcagcagattacgcgcagaaaaaaaggatctcaagaagatcctttgatcttttctacggggtctgacgctcagtggaacgaaaactcacgttaagggattttggtcatgagattatcaaaaaggatcttcacctagatccttttaaattaaaaatgaagttttaaatcaatctaaagtatatatgagtaaacttggtctgacagttaccaatgcttaatcagtgaggcacctatctcagcgatctgtctatttcgttcatccatagttgcctgactccccgtcgtgtagataactacgatacgggagcgcttaccatctggccccagtgctgcaatgataccgcgagacccacgctcaccggctccagatttatcagcaataaaccagccagccggaagggccgagcgcagaagtggtcctgcaactttatccgcctccattcagtctattaattgttgccgggaagctagagtaagtagttcgccagttaatagtttgcgcaacgttgttggcattgctacaggcatcgtggtgtcactctcgtcgtttggtatggcttcattcagctccggttcccaacgatcaaggcgagttacatgatcccccatgttgtgcaaaaaagcggttagctccttcggtcctccgatcgttgtcagaagtaagttggccgcagtgttatcactcatggttatggcagcactgcataattctcttactgtcatgccatccgtaagatgcttttctgtgactggtgagtactcaaccaagtcattctgagaatagtgtatgcggcgaccgagttgctcttgcccggcgtcaatacgggataatagtgtatcacatagcagaactttaaaagtgctcatcattggaaaacgttcttcggggcgaaaactctcaaggatcttaccgctgttgagatccagttcgatgtaacccactcgtgcacccaactgatcttcagcatcttttactttcaccagcgtttctgggtgagcaaaaacaggaaggcaaaatgccgcaaaaaagggaataagggcgacacggaaatgttgaatactcatactcttcctttttcaatgggtaataactgatataattaaattgaagctctaatttgtgagtttagtatacatgcatttacttataatacagttttttagttttgctggccgcatcttctcaaatatgcttcccagcctgcttttctgtaacgttcaccctctaccttagcatcccttccctttgcaaatagtcctcttccaacaataataatgtcagatcctgtagagaccacatcatccacggttctatactgttgacccaatgcgtctcccttgtcatctaaacccacaccgggtgtcataatcaaccaatcgtaaccttcatctcttccacccatgtctctttgagcaataaagccgataacaaaatctttgtcgctcttcgcaatgtcaacagtacccttagtatattctccagtagatagggagcccttgcatgacaattctgctaacatcaaaaggcctctaggttcctttgttacttcttctgccgcctgcttcaaaccgctaacaatacctgggcccaccacaccgtgtgcattcgtaatgtctgcccattctgctattctgtatacacccgcagagtactgcaatttgactgtattaccaatgtcagcaaattttctgtcttcg

SEQ ID NO: 405 - protein, 530 aa, Artificial Sequence
  CSAAE1
MGKNYKSDSVVASDNAGNTSVATHGRANVCNYGAATTWNNNANHNSDSHMYGCYKDGAAWNDKVKSTNGAKRGKGVKYKDNSSSHSVRNVYWRTVMDMKNSSKDCNRRDDNNNGGSWGGYNSAKNCNVNSNKKNDTMNVWRDGNDDNKTDRKRVWVGYAMGKGCANANDMMHVDAVVNYANVAGYVVVSNADSSANSTRRSKAKANTDHNNRGKKRNYSRVVAKSMANVNCSGSNNGARDGDNSWDYRAKKNCTARVDAYTNNSSGTTGKANWTATKAAADGWSHDNRKGDVNVWTNGWMMGWVYASNGASNAYNGSVSGAKVDAKVTMGVVSNVRSWKSTNCVSGYDWSTNRCSSSGASNVDYWMGRANYKVNMCGGTNGGASAGSASSSSSCMGCTYNDKNGYMKNKGNGAGVMGASKTNGNHHDVYKGMTNGVRRHGDNTSNGYYHAHGRADDTMNNGGNKNSSNNRVCNVDDRVTTANGVGGGVNVKDSNDTTNDNRSNGKKNKVTRVVSSRTATNKNMRRVRSHG

SEQ ID NO: 406 - protein, 102 aa, Artificial Sequence
  OAC (PC20) enzyme
MNVKHLIVLKFKDEITEAQKEEFFKTYVNLVNIIPAMKDVYWGKDVTQKNKEEGYTHIVEVTFESVETIQDYIIHPAHVGFGDVYRSFWEKLLIFDYTPRKG

SEQ ID NO: 407 - protein, 333 aa, Artificial Sequence
  PT72 aa
MPATRTPIHPEAAAYKNPRYQSGPLSVIPKSFVPYCELMRLELPHGNFLGYFPHLVGLLYGSSASPARLPANEVAFQAVLYIGWTFFMRGAGCAWNDVVDQDFDRKTTRCRVRPVARGAVSTTSANIFGFAMVALAFACISPLPAECQRLGLMTTVLSIIYPFCKRVTNFAQVILGMTLAINFILAAYGAGLPAIEAPYTVPTICVTTAITLLVVFYDVVYARQDTADDLKSGVKGMAVLFRNYVEILLTSITLVIAGLIATTGVLVDNGPYFFVFSVAGLLAALLAMIGGIRYRIFHTWNSYSGWFYALAIFNLLGGYLIEYLDQVPMLNKA

SEQ ID NO: 408 - protein, 351 aa, Artificial Sequence; identical to SEQ ID NO: 1
  PT104

SEQ ID NO: 409 - protein, 323 aa, Artificial Sequence
  PT254
MRAGSDQIEGSPHHESDNSIATKILNFGHTCWKLQRPYVVKGMISIACGLFGRELFNNRHLFSWGLMWKAFFALVPILSFNFFAAIMNQIYDVDIDRINKPDLPLVSGEMSIETAWILSIIVALTGLIVTIKLKSAPLFVFIYIFGIFAGFAYSVPPIRWKQYPFTNFLITISSHVGLAFTSYSATTSALGLPFVWRPAFSFIIAFMTVMGMTIAFAKDISDIEGDAKYGVSTVATKLGARNMTFVVSGVLLLNYLVSISIGIIWPQVFKSNIMILSHAILAFCLIFQTRELALANYASAPSRQFFEFIWLLYYAEYFVYVFI

SEQ ID NO: 410 - protein, 329 aa, Artificial Sequence
  PT296
MSAKVSPMAYTNPRYETGPLSLIPKPIVPYFELMRFELPHGYYLGYFPHLVGIMYGASAGPERLPARDLVFQALLYVGWTFAMRGAGCAWNDNIDQDFDRKTERCRTRPIARGAVSTTAGHVFAVAGVALAFLCLSPLPTECHQLGVLVTVLSVIYPFCKRFTNFAQVILGMTLAANFILAAYGAGLPALEQPYTRPTMSATLAITLLVVFYDVVYARQDTADDLKSGVKGMAVLFRNHIEVLLAVLTCTIGGLLAATGVSVGNGPYYFLFSVAGLTVALLAMIGGIRYRIFHTWNGYSGWFYVLAIINLMSGYFIEYLDNAPILARGS

SEQ ID NO: 411 - protein, 616 aa, Artificial Sequence
  OXC53
MRQVWFSWIVGLFLCFFNVSSAAPVNTTTEDETAQIPAEAVIGYSDLEGDFDVAVLPFSNSTNNGLLFINTTIASIAAKEEGVSLEKREAEAMPRENFLKCFSKHIPNNVANPKLVYTQHDQLYMSILNSTIQNLRFISDTTPKPLVIVTPSNNSHIQATILCSKKVGLQIRTRSGGHDAEGMSYISQVPFVVVDLRNMHSIKIDVHSQTAWVEAGATLGEVYYWINEKNENLSFPGGYCPTVGVGGHFSGGGYGALMRNYGLAADNIIDAHLVNVDGKVLDRKSMGEDLFWAIRGGGGENFGIIAAWKIKLVAVPSKSTIFSVKKNMEIHGLVKLFNKWQNIAYKYDKDLVLMTHFITKNITDNHGKNKTTVHGYFSSIFHGGVDSLVDLMNKSFPELGIKKTDCKEFSWIDTTIFYSGVVNFNTANFKKEILLDRSAGKKTAFSIKLDYVKKPIPETAMVKILEKLYEEDVGAGMYVLYPYGGIMEEISESAIPFPHRAGIMYELWYTASWEKQEDNEKHINWVRSVYNFTTPYVSQNPRLAYLNYRDLDLGKTNHASPNNYTQARIWGEKYFGKNFNRLVKVKTKVDPNNFFRNEQSIPPLPPHHHGHHHHHH

SEQ ID NO: 412 - protein, 102 aa, Cannabis Sativa; identical to SEQ ID NO: 15

SEQ ID NO: 413 - protein, 323 aa, Cannabis sativa; identical to SEQ ID NO: 409

SEQ ID NO: 414 - protein, 323 aa, Cannabis sativa
MSAGSDQIEGSPHHESDNSIATKILNFGHTCWKLQRPYVVKGMISIACGLFGRELFNNRHLFSWGLMWKAFFALVPILSFNFFAAIMNQIYDVDIDRINKPDLPLVSGEMSIETAWILSIIVALTGLIVTIKLKSAPLFVFIYIFGIFAGFAYSVPPIRWKQYPFTNFLITISSHVGLAFTSYSATTSALGLPFVWRPAFSFIIAFMTVMGMTIAFAKDISDIEGDAKYGVSTVATKLGARNMTFVVSGVLLLNYLVSISIGIIWPQVFKSNIMILSHAILAFCLIFQTRELALANYASAPSRQFFEFIWLLYYAEYFVYVFI

SEQ ID NO: 415 - DNA, 2177 bp, Artificial Sequence; identical to SEQ ID NO: 14
  Cassette with csOAC coding sequence, inducible Gal1 promoter and Eno2 termination sequence.
  exon (842)..(1150)

SEQ ID NO: 416 - DNA, 3097 bp, Artificial Sequence
  Cassette with PT254 coding sequence, inducible Gal1 promoter and Cyc1 termination sequence.
  exon (1162)..(2133)
ataaagcagccgctaccaaacagacaagattcagtatgtaaggtaaatacctttttgcacagttaaactacccaaacttattaaagcttgataaattactgaaattccacctttcagttagattcaggcctcatatagattagatatagggtacgtaacattctgtcaaccaagttgttggaatgaaagtctaaaatgtcatctattcggtagcactcatgttactagtatactgtcacatgcggtgtaacgtggggacataaaacagacatcaaatataatggaagctgaaatgcaaagatcgataatgtaataggaatgaaacatataaaacgaaaggagaagtaatggtaatattagtatgtagaaataccgattcaattttggggattcttatattctcgagagaatttctagtataatctgtatacataatattataggctttaccaacaatggaatttcgacaattatcatattattcaccaattaatcacaagttggtaatgagtttgataacaagttactttcttaacaacgttagtatcgtcaaaacactcggttttactcgagcttgtagcacaataataccgtgtagagttctgtattgttcttcttagtgcttgtatatgctcatcccgaccttccattcggattagaagccgccgagcgggtgacagccctccgaaggaagactctcctccgtgcgtcctcgtcttcaccggtcgcgttcctgaaacgcagatgtgcctcgcgccgcactgctccgaacaataaagattctacaatactagcttttatggttatgaagaggaaaaattggcagtaacctggccccacaaaccttcaaatgaacgaatcaaattaacaaccataggatgataatgcgattagttttttagccttatttctggggtaattaatcagcgaagcgatgatttttgatctattaacagatatataaatgcaaaaactgcataaccactttaactaatactttcaacattttcggtttgtattacttcttattcaaatgtaataaaagtatcaacaaaaaattgttaatatacctctatactttaacgtcaaggagaaaaaaccccggatcggactactagcagctgtaatacgactcactatagggaatattaagcttaaacaatgagagccggttccgatcaaattgaaggttctccacatcatgaatccgataactctattgccaccaagattttgaacttcggtcatacttgttggaagttgcaaagaccatatgttgtcaagggtatgatttctattgcttgcggtttgtttggtcgtgagttgtttaacaacagacacttgttttcttggggcttgatgtggaaagctttttttgctttggttcccatcctgtcctttaatttctttgccgccattatgaaccagatctacgatgttgatatcgacagaatcaacaagccagatttgccattggtttctggtgaaatgtctattgaaaccgcctggattttgtccattatcgttgctttgactggtttgatcgttaccatcaagttgaaatctgctcccttgttcgttttcatctacatctttggtattttcgctggtttcgcttattccgttccaccaattagatggaaacaatacccattcaccaatttcttgatcaccatctcttctcatgttggtttggctttcacttcttactctgctactacttctgctttgggtttaccatttgtttggaggccagctttctctttcattattgctttcatgaccgttatgggtatgaccattgctttcgctaaggatatctctgatattgaaggtgatgctaagtacggtgtttctactgttgctacaaaattgggtgctagaaacatgacctttgttgtctctggtgttctgttgttgaactacttggtttccatttccattggtatcatttggccacaggttttcaagtccaacatcatgattttgtctcatgccatcttggctttctgcttgatttttcaaactagagaattggccttggctaactatgcttctgctccatctagacaattcttcgaattcatctggttgttgtactacgccgaatacttcgtctacgtgttcatttgactcgagcatgcatctagagggccgcatcatgtaattagttatgtcacgcttacattcacgccctccccccacatccgctctaaccgaaaaggaaggagttagacaacctgaagtctaggtccctatttatttttttatagttatgttagtattaagaacgttatttatatttcaaatttttcttttttttctgtacagacgcgtgtacgcatgtaacattatactgaaaaccttgcttgagaaggttttgggacgctcgaaggctttaatttgctttgcgaaaccctatgctctgttgttcggatttgaaattttaaaactacattaatgtgttagtttttctttctttctttctttgtcttgacgtgatttggacttctgtcttgcattcgcgtccattcatctgacccaatattccttttggttttgttatccttataaaaagaaaggaagcttcttagagggaaaaaaatgatgaagagtaatgccaaaatataaataaataaataaatatgaaaatcattttctatttttaatagaataagaagagcatcttaagattacaatttcaagaaatagtttacacagtatatccaataactccaataaactactttcctatacaaatttctatggtgggattaatagtaaaacttctgtacttctctaattcaccaagaaattaaggtaaacatctggtaagcactatccagctttttgctattacacatatggcttttctgcaatcatttcttcccattttgtctcaagccgttagtcttgaaaccacaggcggagtagagttacttgatgcggtattttacatgccttttttcactgcaaaaaaaatgaaatacatatttacacgatttgcaggacagtttacgatagtgagtatgcagaatagttaacacctttgttttatccttttgtgtcttaattatatgatataaaggcgcctggc

SEQ ID NO: 417 - DNA, 3097 bp, Artificial Sequence
  Cassette with PT254_R2S coding sequence, inducible Gal1 promoter and Cyc1 termination sequence.
  exon (1162)..(2133)
ataaagcagccgctaccaaacagacaagattcagtatgtaaggtaaatacctttttgcacagttaaactacccaaacttattaaagcttgataaattactgaaattccacctttcagttagattcaggcctcatatagattagatatagggtacgtaacattctgtcaaccaagttgttggaatgaaagtctaaaatgtcatctattcggtagcactcatgttactagtatactgtcacatgcggtgtaacgtggggacataaaacagacatcaaatataatggaagctgaaatgcaaagatcgataatgtaataggaatgaaacatataaaacgaaaggagaagtaatggtaatattagtatgtagaaataccgattcaattttggggattcttatattctcgagagaatttctagtataatctgtatacataatattataggctttaccaacaatggaatttcgacaattatcatattattcaccaattaatcacaagttggtaatgagtttgataacaagttactttcttaacaacgttagtatcgtcaaaacactcggttttactcgagcttgtagcacaataataccgtgtagagttctgtattgttcttcttagtgcttgtatatgctcatcccgaccttccattcggattagaagccgccgagcgggtgacagccctccgaaggaagactctcctccgtgcgtcctcgtcttcaccggtcgcgttcctgaaacgcagatgtgcctcgcgccgcactgctccgaacaataaagattctacaatactagcttttatggttatgaagaggaaaaattggcagtaacctggccccacaaaccttcaaatgaacgaatcaaattaacaaccataggatgataatgcgattagttttttagccttatttctggggtaattaatcagcgaagcgatgatttttgatctattaacagatatataaatgcaaaaactgcataaccactttaactaatactttcaacattttcggtttgtattacttcttattcaaatgtaataaaagtatcaacaaaaaattgttaatatacctctatactttaacgtcaaggagaaaaaaccccggatcggactactagcagctgtaatacgactcactatagggaatattaagcttaaacaatgagcgccggttccgatcaaattgaaggttctccacatcatgaatccgataactctattgccaccaagattttgaacttcggtcatacttgttggaagttgcaaagaccatatgttgtcaagggtatgatttctattgcttgcggtttgtttggtcgtgagttgtttaacaacagacacttgttttcttggggcttgatgtggaaagctttttttgctttggttcccatcctgtcctttaatttctttgccgccattatgaaccagatctacgatgttgatatcgacagaatcaacaagccagatttgccattggtttctggtgaaatgtctattgaaaccgcctggattttgtccattatcgttgctttgactggtttgatcgttaccatcaagttgaaatctgctcccttgttcgttttcatctacatctttggtattttcgctggtttcgcttattccgttccaccaattagatggaaacaatacccattcaccaatttcttgatcaccatctcttctcatgttggtttggctttcacttcttactctgctactacttctgctttgggtttaccatttgtttggaggccagctttctctttcattattgctttcatgaccgttatgggtatgaccattgctttcgctaaggatatctctgatattgaaggtgatgctaagtacggtgtttctactgttgctacaaaattgggtgctagaaacatgacctttgttgtctctggtgttctgttgttgaactacttggtttccatttccattggtatcatttggccacaggttttcaagtccaacatcatgattttgtctcatgccatcttggctttctgcttgatttttcaaactagagaattggccttggctaactatgcttctgctccatctagacaattcttcgaattcatctggttgttgtactacgccgaatacttcgtctacgtgttcatttgactcgagcatgcatctagagggccgcatcatgtaattagttatgtcacgcttacattcacgccctccccccacatccgctctaaccgaaaaggaaggagttagacaacctgaagtctaggtccctatttatttttttatagttatgttagtattaagaacgttatttatatttcaaatttttcttttttttctgtacagacgcgtgtacgcatgtaacattatactgaaaaccttgcttgagaaggttttgggacgctcgaaggctttaatttgctttgcgaaaccctatgctctgttgttcggatttgaaattttaaaactacattaatgtgttagtttttctttctttctttctttgtcttgacgtgatttggacttctgtcttgcattcgcgtccattcatctgacccaatattccttttggttttgttatccttataaaaagaaaggaagcttcttagagggaaaaaaatgatgaagagtaatgccaaaatataaataaataaataaatatgaaaatcattttctatttttaatagaataagaagagcatcttaagattacaatttcaagaaatagtttacacagtatatccaataactccaataaactactttcctatacaaatttctatggtgggattaatagtaaaacttctgtacttctctaattcaccaagaaattaaggtaaacatctggtaagcactatccagctttttgctattacacatatggcttttctgcaatcatttcttcccattttgtctcaagccgttagtcttgaaaccacaggcggagtagagttacttgatgcggtattttacatgccttttttcactgcaaaaaaaatgaaatacatatttacacgatttgcaggacagtttacgatagtgagtatgcagaatagttaacacctttgttttatccttttgtgtcttaattatatgatataaaggcgcctggc

SEQ ID NO: 418 - DNA, 4995 bp, Artificial Sequence
  Plasmid
  exon (517)..(822): CDS for C. sativa olivetolic acid cyclase
cgcgcccggattagaagccgccgagcgggtgacagccctccgaaggaagactctcctccgtgcgtcctcgtcttcaccggtcgcgttcctgaaacgcagatgtgcctcgcgccgcactgctccgaacaataaagattctacaatactagcttttatggttatgaagaggaaaaattggcagtaacctggccccacaaaccttcaaatgaacgaatcaaattaacaaccataggatgataatgcgattagttttttagccttatttctggggtaattaatcagcgaagcgatgatttttgatctattaacagatatataaatgcaaaaactgcataaccactttaactaatactttcaacattttcggtttgtattacttcttattcaaatgtaataaaagtatcaacaaaaaattgttaatatacctctatactttaacgtcaaggagaaaaaaccccggatcggactactagcagctgtaatacgactcactatagggaatattaagcttaaacaatggccgtcaagcacttgatcgtcttaaagtttaaggacgagatcactgaagcccaaaaggaagaattcttcaaaacttacgttaacttggttaacatcattcctgctatgaaggacgtctactggggtaaggatgtcactcaaaaaaacaaggaagaaggttatacccacatcgttgaagtcaccttcgaatctgttgaaactattcaagactacatcattcacccagctcacgtcggtttcggtgatgtttacagatctttctgggaaaaattgttgatcttcgactacaccccaagaaagggctaactcgagcatgcatctagagggccgcatcatgtaattagttatgtcacgcttacattcacgccctccccccacatccgctctaaccgaaaaggaaggagttagacaacctgaagtctaggtccctatttatttttttatagttatgttagtattaagaacgttatttatatttcaaatttttcttttttttctgtacagacgcgtgtacgcatgtaacattatactgaaaaccttgcttgagaaggttttgggacgctcgaaggctttaatttgcggcgcgcccctctttatattacatcaaaataagaaaataattataacaagcttgcctcgtccccgccgggtcacccggccagcgacatggaggcccagaataccctccttgacagtcttgacgtgcgcagctcaggggcatgatgtgactgtcgcccgtacatttagcccatacatccccatgtataatcatttgcatccatacattttgatggccgcacggcgcgaagcaaaaattacggctcctcgctgcaagcttgcctcgtccccgccgggtcacccggccagcgacatggaggcccagaataccctccttgacagtcttgacgtgcgcagctcaggggcatgatgtgactgtcgcccgtacatttagcccatacatccccatgtataatcatttgcatccatacattttgatggccgcacggcgcgaagcaaaaattacggctcctcgctgcagacctgcgagcagggaaacgctcccctcacagacgcgttgaattgtccccacgccgcgcccctgtagagaaatataaaaggttaggatttgccactgaggttcttctttcatatacttccttttaaaatcttgctaggatacagttctcacatcacatccgaacataaacaaccatgggtaaaaagcctgaactcaccgcgacgtctgtcgagaagtttctgatcgaaaagttcgacagcgtctccgacctgatgcagctctcggagggcgaagaatctcgtgctttcagcttcgatgtaggagggcgtggatatgtcctgcgggtaaatagctgcgccgatggtttctacaaagatcgttatgtttatcggcactttgcatcggccgcgctcccgattccggaagtgcttgacattggggaattcagcgagagcctgacctattgcatctcccgccgtgcacagggtgtcacgttgcaagacctgcctgaaaccgaactgcccgctgttctgcagccggtcgcggaggccatggatgcgatcgctgcggccgatcttagccagacgagcgggttcggcccattcggaccgcaaggaatcggtcaatacactacatggcgtgatttcatatgcgcgattgctgatccccatgtgtatcactggcaaactgtgatggacgacaccgtcagtgcgtccgtcgcgcaggctctcgatgagctgatgctttgggccgaggactgccccgaagtccggcacctcgtgcacgcggatttcggctccaacaatgtcctgacggacaatggccgcataacagcggtcattgactggagcgaggcgatgttcggggattcccaatacgaggtcgccaacatcttcttctggaggccgtggttggcttgtatggagcagcagacgcgctacttcgagcggaggcatccggagcttgcaggatcgccgcggctccgggcgtatatgctccgcattggtcttgaccaactctatcagagcttggttgacggcaatttcgatgatgcagcttgggcgcagggtcgatgcgacgcaatcgtccgatccggagccgggactgtcgggcgtacacaaatcgcccgcagaagcgcggccgtctggaccgatggctgtgtagaagtactcgccgatagtggaaaccgacgccccagcactcgtccgagggcaaaggaataatctcgagtcatgtaattagttatgtcacgcttacattcacgccctccccccacatccgctctaaccgaaaaggaaggagttagacaacctgaagtctaggtccctatttatttttttatagttatgttagtattaagaacgttatttatatttcaaatttttcttttttttctgtacagacgcgtgtacgcatgtaacattatactgaaaaccttgcttgagaaggttttgggacgctcgaaggctttaacgagctcctcgagaacccttaattatagccagacatcagcagcatacttcgggaaccgtaggccgaagcatctgtgcttcattttgtagaacaaaaatgcaacgcgagagcgctaatttttcaaacaaagaatctgagctgcatttttacagaacagaaatgcaacgcgaaagcgctattttaccaacgaagaatctgtgcttcatttttgtaaaacaaaaatgcaacgcgagagcgctaatttttcaaacaaagaatctgagctgcatttttacagaacagaaatgcaacgcgagagcgctattttaccaacaaagaatctatacttcttttttgttctacaaaaatgcatcccgagagcgctatttttctaacaaagcatcttagattactttttttctcctttgtgcgctctataatgcagtctcttgataactttttgcactgtaggtccgttaaggttagaagaaggctactttggtgtctattttctcttccataaaaaaagcctgactccacttcccgcgtttactgattactagcgaagctgcgggtgcattttttcaagataaaggcatccccgattatattctataccgatgtggattgcgcatactttgtgaacagaaagtgatagcgttgatgattcttcattggtcagaaaattatgaacggtttcttctattttgtctctatatactacgtataggaaatgtttacattttcgtattgttttcgattcactctatgaatagttcttactacaatttttttgtctaaagagtaatactagagataaacataaaaaatgtagaggtcgagtttagatgcaagttcaaggagcgaaaggtggatgggtaggttatatagggatatagcacagagatatatagcaaagagatacttttgagcaatgtttgtggaagcggtattcgcaatattttagtagctcgttacagtccggtgcgtttttggttttttgaaagtgcgtcttcagagcgcttttggttttcaaaagcgctctgaagttcctatactttctagagaataggaacttcggaataggaacttcaaagcgtttccgaaaacgagcgcttccgaaaatgcaacgcgagctgcgcacatacagctcactgttcacgtcgcacctatatctgcgtgttgcctgtatatatatatacatgagaagaacggcatagtgcgtgtttatgcttaaatgctcctactttaccgacgtcaggctacgtccatgatcgttcgggccgcgttgctggcgtttttccataggctccgcccccctgacgagcatcacaaaaatcgacgctcaagtcagaggtggcgaaacccgacaggactataaagataccaggcgtttccccctggaagctccctcgtgcgctctcctgttccgaccctgccgcttaccggatacctgtccgcctttctcccttcgggaagcgtggcgctttctcaatgctcacgctgtaggtatctcagttcggtgtaggtcgttcgctccaagctgggctgtgtgcacgaaccccccgttcagcccgaccgctgcgccttatccggtaactatcgtcttgagtccaacccggtaagacacgacttatcgccactggcagcagccactggtaacaggattagcagagcgaggtatgtaggcggtgctacagagttcttgaagtggtggcctaactacggctacactagaaggacagtatttggtatctgcgctctgctgaagccagttaccttcggaaaaagagttggtagctcttgatccggcaaacaaaccaccgctggtagcggtggtttttttgtttgcaagcagcagattacgcgcagaaaaaaaggatctcaagaagatcctttgatcttttctacggggtctgacgctcagtggaacgaaaactcacgttaagggattttggtcatgaaggaatactctgaataaaacaacttatataataaaaatgcgg

SEQ ID NO: 419 - DNA, 7432 bp, Artificial Sequence
  Plasmid
  exon (1)..(1626): CDS for C. sativa tetrahydrocannabinolic acid synthase
atgatttttgatggtactactatgtctattgctattggtttgttgtctactttgggtattggtgctgaagctatgccaagagaaaacttcttgaagtgtttctctaagcatatcccaaacaacgttgctaacccaaagttggtctatactcaacacgatcaattgtatatgtctattttgaactctactattcaaaatttgagattcatttctgataccaccccaaaaccattggtcattgtcactccttccaacaactcccatatccaagctactattttgtgttctaagaaggtcggtttgcaaatcagaaccagatctggtggtcacgatgccgagggtatgtcctacatttctcaagttccttttgtcgttgttgatttgagaaacatgcactccatcaaaattgatgttcactcccaaaccgcctgggtcgaagctggtgccactttgggtgaagtctactactggattaatgaaaagaatgaaaatttgtccttcccaggtggttactgtccaaccgttggtgttggtggtcacttctccggtggtggttacggtgctttgatgagaaactacggtttagctgctgataacattatcgacgcccacttggttaatgttgatggtaaagtcttggacagaaaatctatgggtgaagatttgttttgggccattagaggtggtggtggtgagaacttcggtatcattgctgcctggaagatcaaattggttgctgttccatctaagtccactattttttccgttaagaagaacatggaaatccatggtttagttaaattatttaacaagtggcaaaacattgcctacaagtacgataaagatttggttttgatgacccatttcattactaagaatattactgacaatcacggtaagaacaagactaccgttcacggttacttctcttctattttccacggtggtgtcgactccttagttgatttgatgaacaaatcctttccagagttgggtattaagaagactgattgtaaggaattctcttggattgacaccaccatcttctactctggtgtcgtcaactttaacactgccaactttaagaaggaaattttattggatagatccgctggtaagaagaccgctttttccatcaaattggattacgtcaagaagccaatccctgagactgccatggtcaagatcttggaaaagttgtatgaagaagacgttggtgctggtatgtacgttttatatccatacggtggtattatggaagagatttccgaatccgctattccattcccacatagagctggtatcatgtacgaattgtggtacactgcttcttgggaaaaacaagaagataatgaaaagcatattaactgggttagatccgtttacaacttcaccactccatatgtttctcaaaacccaagattggcttacttgaactatagagatttggatttgggtaagactaaccacgcctctccaaacaattacactcaagctagaatctggggtgaaaaatacttcggtaagaacttcaacagattagtcaaagtcaagaccaaagttgacccaaacaacttcttcagaaacgagcaatccattcctccattgcctccacaccatcacggccatcatcaccatcaccattagctcgagcatgcatctagagggccgcatcatgtaattagttatgtcacgcttacattcacgccctccccccacatccgctctaaccgaaaaggaaggagttagacaacctgaagtctaggtccctatttatttttttatagttatgttagtattaagaacgttatttatatttcaaatttttcttttttttctgtacagacgcgtgtacgcatgtaacattatactgaaaaccttgcttgagaaggttttgggacgctcgaaggctttaatttgcggccctgcattaatgaatcggccaacgcgcggggagaggcggtttgcgtattgggcgctcttccgcttcctcgctcactgactcgctgcgctcggtcgttcggctgcggcgagcggtatcagctcactcaaaggcggtaatacggttatccacagaatcaggggataacgcaggaaagaacatgtgagcaaaaggccagcaaaagcccaggaaccgtaaaaaggccgcgttgctggcgtttttccataggctccgcccccctgacgagcatcacaaaaatcgacgctcaagtcagaggtggcgaaacccgacaggactataaagataccaggcgtttccccctggaagctccctcgtgcgctctcctgttccgaccctgccgcttaccggatacctgtccgcctttctcccttcgggaagcgtggcgctttctcatagctcacgctgtaggtatctcagttcggtgtaggtcgttcgctccaagctgggctgtgtgcacgaaccccccgttcagcccgaccgctgcgccttatccggtaactatcgtcttgagtccaacccggtaagacacgacttatcgccactggcagcagccactggtaacaggattagcagagcgaggtatgtaggcggtgctacagagttcttgaagtggtggcctaactacggctacactagaaggacagtatttggtatctgcgctctgctgaagccagttaccttcggaaaaagagttggtagctcttgatccggcaaacaaaccaccgctggtagcggtggtttttttgtttgcaagcagcagattacgcgcagaaaaaaaggatctcaagaagatcctttgatcttttctacggggtctgacgctcagtggaacgaaaactcacgttaagggattttggtcatgagattatcaaaaaggatcttcacctagatccttttaaattaaaaatgaagttttaaatcaatctaaagtatatatgagtaaacttggtctgacagttaccaatgcttaatcagtgaggcacctatctcagcgatctgtctatttcgttcatccatagttgcctgactccccgtcgtgtagataactacgatacgggagcgcttaccatctggccccagtgctgcaatgataccgcgagacccacgctcaccggctccagatttatcagcaataaaccagccagccggaagggccgagcgcagaagtggtcctgcaactttatccgcctccattcagtctattaattgttgccgggaagctagagtaagtagttcgccagttaatagtttgcgcaacgttgttggcattgctacaggcatcgtggtgtcactctcgtcgtttggtatggcttcattcagctccggttcccaacgatcaaggcgagttacatgatcccccatgttgtgcaaaaaagcggttagctccttcggtcctccgatcgttgtcagaagtaagttggccgcagtgttatcactcatggttatggcagcactgcataattctcttactgtcatgccatccgtaagatgcttttctgtgactggtgagtactcaaccaagtcattctgagaatagtgtatgcggcgaccgagttgctcttgcccggcgtcaatacgggataatagtgtatcacatagcagaactttaaaagtgctcatcattggaaaacgttcttcggggcgaaaactctcaaggatcttaccgctgttgagatccagttcgatgtaacccactcgtgcacccaactgatcttcagcatcttttactttcaccagcgtttctgggtgagcaaaaacaggaaggcaaaatgccgcaaaaaagggaataagggcgacacggaaatgttgaatactcatactcttcctttttcaatgggtaataactgatataattaaattgaagctctaatttgtgagtttagtatacatgcatttacttataatacagttttttagttttgctggccgcatcttctcaaatatgcttcccagcctgcttttctgtaacgttcaccctctaccttagcatcccttccctttgcaaatagtcctcttccaacaataataatgtcagatcctgtagagaccacatcatccacggttctatactgttgacccaatgcgtctcccttgtcatctaaacccacaccgggtgtcataatcaaccaatcgtaaccttcatctcttccacccatgtctctttgagcaataaagccgataacaaaatctttgtcgctcttcgcaatgtcaacagtacccttagtatattctccagtagatagggagcccttgcatgacaattctgctaacatcaaaaggcctctaggttcctttgttacttcttctgccgcctgcttcaaaccgctaacaatacctgggcccaccacaccgtgtgcattcgtaatgtctgcccattctgctattctgtatacacccgcagagtactgcaatttgactgtattaccaatgtcagcaaattttctgtcttcgaagagtaaaaaattgtacttggcggataatgcctttagcggcttaactgtgccctccatggaaaaatcagtcaagatatccacatgtgtttttagtaaacaaattttgggacctaatgcttcaactaactccagtaattccttggtggtacgaacatccaatgaagcacacaagtttgtttgcttttcgtgcatgatattaaatagcttggcagcaacaggactaggatgagtagcagcacgttccttatatgtagctttcgacatgatttatcttcgtttcctgcaggtttttgttctgtgcagttgggttaagaatactgggcaatttcatgtttcttcaacactacatatgcgtatatataccaatctaagtctgtgctccttccttcgttcttccttctgttcggagattaccgaatcaaaaaaatttcaaagaaaccgaaatcaaaaaaaagaataaaaaaaaaatgatgaattgaattgaaaagctagcttatcgatgataagctgtcaaagatgagaattaattccacggactatagactatactagatactccgtctactgtacgatacacttccgctcaggtccttgtcctttaacgaggccttaccactcttttgttactctattgatccagctcagcaaaggcagtgtgatctaagattctatcttcgcgatgtagtaaaactagctagaccgagaaagagactagaaatgcaaaaggcacttctacaatggctgccatcattattatccgatgtgacgctgcagcttctcaatgatattcgaatacgctttgaggagatacagcctaatatccgacaaactgttttacagatttacgatcgtacttgttacccatcattgaattttgaacatccgaacctgggagttttccctgaaacagatagtatatttgaacctgtataataatatatagtctagcgctttacggaagacaatgtatgtatttcggttcctggagaaactattgcatctattgcataggtaatcttgcacgtcgcatccccggttcattttctgcgtttccatcttgcacttcaatagcatatctttgttaacgaagcatctgtgcttcattttgtagaacaaaaatgcaacgcgagagcgctaatttttcaaacaaagaatctgagctgcatttttacagaacagaaatgcaacgcgaaagcgctattttaccaacgaagaatctgtgcttcatttttgtaaaacaaaaatgcaacgcgacgagagcgctaatttttcaaacaaagaatctgagctgcatttttacagaacagaaatgcaacgcgagagcgctattttaccaacaaagaatctatacttcttttttgttctacaaaaatgcatcccgagagcgctatttttctaacaaagcatcttagattactttttttctcctttgtgcgctctataatgcagtctcttgataactttttgcactgtaggtccgttaaggttagaagaaggctactttggtgtctattttctcttccataaaaaaagcctgactccacttcccgcgtttactgattactagcgaagctgcgggtgcattttttcaagataaaggcatccccgattatattctataccgatgtggattgcgcatactttgtgaacagaaagtgatagcgttgatgattcttcattggtcagaaaattatgaacggtttcttctattttgtctctatatactacgtataggaaatgtttacattttcgtattgttttcgattcactctatgaatagttcttactacaatttttttgtctaaagagtaatactagagataaacataaaaaatgtagaggtcgagtttagatgcaagttcaaggagcgaaaggtggatgggtaggttatatagggatatagcacagagatatatagcaaagagatacttttgagcaatgtttgtggaagcggtattcgcaatgggaagctccaccccggttgataatcagaaaagccccaaaaacaggaagattgtataagcaaatatttaaattgtaaacgttaatattttgttaaaattcgcgttaaatttttgttaaatcagctcattttttaacgaatagcccgaaatcggcaaaatcccttataaatcaaaagaatagaccgagatagggttgagtgttgttccagtttccaacaagagtccactattaaagaacgtggactccaacgtcaaagggcgaaaaagggtctatcagggcgatggcccactacgtgaaccatcaccctaatcaagttttttggggtcgaggtgccgtaaagcagtaaatcggaagggtaaacggatgcccccatttagagcttgacggggaaagccggcgaacgtggcgagaaaggaagggaagaaagcgaaaggagcgggggctagggcggtgggaagtgtaggggtcacgctgggcgtaaccaccacacccgccgcgcttaatggggcgctacagggcgcgtggggatgatccactagtacggattagaagccgccgagcgggtgacagccctccgaaggaagactctcctccgtgcgtcctcgtcttcaccggtcgcgttcctgaaacgcagatgtgcctcgcgccgcactgctccgaacaataaagattctacaatactagcttttatggttatgaagaggaaaaattggcagtaacctggccccacaaaccttcaaatgaacgaatcaaattaacaaccataggatgataatgcgattagttttttagccttatttctggggtaattaatcagcgaagcgatgatttttgatctattaacagatatataaatgcaaaaactgcataaccactttaactaatactttcaacattttcggtttgtattacttcttattcaaatgtaataaaagtatcaacaaaaaattgttaatatacctctatactttaacgtcaaggagaaaaaaccccggatcggactactagcagctgtaatacgactcactatagggaatattaagcttaaaca

SEQ ID NO: 420 - DNA, 8980 bp, Artificial Sequence; identical to SEQ ID NO: 18
  Plasmid

SEQ ID NO: 421 - protein, 518 aa, Cannabis sativa
MNPRENFLKCFSQYIPNNATNLKLVYTQNNPLYMSVLNSTIHNLRFTSDTTPKPLVIVTPSHVSHIQGTILCSKKVGLQIRTRSGGHDSEGMSYISQVPFVIVDLRNMRSIKIDVHSQTAWVEAGATLGEVYYWVNEKNENLSLAAGYCPTVCAGGHFGGGGYGPLMRNYGLAADNIIDAHLVNVHGKVLDRKSMGEDLFWALRGGGAESFGIIVAWKIRLVAVPKSTMFSVKKIMEIHELVKLVNKWQNIAYKYDKDLLLMTHFITRNITDNQGKNKTAIHTYFSSVFLGGVDSLVDLMNKSFPELGIKKTDCRQLSWIDTIIFYSGVVNYDTDNFNKEILLDRSAGQNGAFKIKLDYVKKPIPESVFVQILEKLYEEDIGAGMYALYPYGGIMDEISESAIPFPHRAGILYELWYICSWEKQEDNEKHLNWIRNIYNFMTPYVSKNPRLAYLNYRDLDIGINDPKNPNNYTQARIWGEKYFGKNFDRLVKVKTLVDPNNFFRNEQSIPPLPRHRHG

SEQ ID NO: 422 - DNA, 3888 bp, Artificial Sequence
  Backbone for pHygro (PLAS182)
cctctttatattacatcaaaataagaaaataattataacaagcttgcctcgtccccgccgggtcacccggccagcgacatggaggcccagaataccctccttgacagtcttgacgtgcgcagctcaggggcatgatgtgactgtcgcccgtacatttagcccatacatccccatgtataatcatttgcatccatacattttgatggccgcacggcgcgaagcaaaaattacggctcctcgctgcaagcttgcctcgtccccgccgggtcacccggccagcgacatggaggcccagaataccctccttgacagtcttgacgtgcgcagctcaggggcatgatgtgactgtcgcccgtacatttagcccatacatccccatgtataatcatttgcatccatacattttgatggccgcacggcgcgaagcaaaaattacggctcctcgctgcagacctgcgagcagggaaacgctcccctcacagacgcgttgaattgtccccacgccgcgcccctgtagagaaatataaaaggttaggatttgccactgaggttcttctttcatatacttccttttaaaatcttgctaggatacagttctcacatcacatccgaacataaacaaccatgggtaaaaagcctgaactcaccgcgacgtctgtcgagaagtttctgatcgaaaagttcgacagcgtctccgacctgatgcagctctcggagggcgaagaatctcgtgctttcagcttcgatgtaggagggcgtggatatgtcctgcgggtaaatagctgcgccgatggtttctacaaagatcgttatgtttatcggcactttgcatcggccgcgctcccgattccggaagtgcttgacattggggaattcagcgagagcctgacctattgcatctcccgccgtgcacagggtgtcacgttgcaagacctgcctgaaaccgaactgcccgctgttctgcagccggtcgcggaggccatggatgcgatcgctgcggccgatcttagccagacgagcgggttcggcccattcggaccgcaaggaatcggtcaatacactacatggcgtgatttcatatgcgcgattgctgatccccatgtgtatcactggcaaactgtgatggacgacaccgtcagtgcgtccgtcgcgcaggctctcgatgagctgatgctttgggccgaggactgccccgaagtccggcacctcgtgcacgcggatttcggctccaacaatgtcctgacggacaatggccgcataacagcggtcattgactggagcgaggcgatgttcggggattcccaatacgaggtcgccaacatcttcttctggaggccgtggttggcttgtatggagcagcagacgcgctacttcgagcggaggcatccggagcttgcaggatcgccgcggctccgggcgtatatgctccgcattggtcttgaccaactctatcagagcttggttgacggcaatttcgatgatgcagcttgggcgcagggtcgatgcgacgcaatcgtccgatccggagccgggactgtcgggcgtacacaaatcgcccgcagaagcgcggccgtctggaccgatggctgtgtagaagtactcgccgatagtggaaaccgacgccccagcactcgtccgagggcaaaggaataatctcgagtcatgtaattagttatgtcacgcttacattcacgccctccccccacatccgctctaaccgaaaaggaaggagttagacaacctgaagtctaggtccctatttatttttttatagttatgttagtattaagaacgttatttatatttcaaatttttcttttttttctgtacagacgcgtgtacgcatgtaacattatactgaaaaccttgcttgagaaggttttgggacgctcgaaggctttaacgagctcctcgagaacccttaattatagccagacatcagcagcatacttcgggaaccgtaggccgaagcatctgtgcttcattttgtagaacaaaaatgcaacgcgagagcgctaatttttcaaacaaagaatctgagctgcatttttacagaacagaaatgcaacgcgaaagcgctattttaccaacgaagaatctgtgcttcatttttgtaaaacaaaaatgcaacgcgagagcgctaatttttcaaacaaagaatctgagctgcatttttacagaacagaaatgcaacgcgagagcgctattttaccaacaaagaatctatacttcttttttgttctacaaaaatgcatcccgagagcgctatttttctaacaaagcatcttagattactttttttctcctttgtgcgctctataatgcagtctcttgataactttttgcactgtaggtccgttaaggttagaagaaggctactttggtgtctattttctcttccataaaaaaagcctgactccacttcccgcgtttactgattactagcgaagctgcgggtgcattttttcaagataaaggcatccccgattatattctataccgatgtggattgcgcatactttgtgaacagaaagtgatagcgttgatgattcttcattggtcagaaaattatgaacggtttcttctattttgtctctatatactacgtataggaaatgtttacattttcgtattgttttcgattcactctatgaatagttcttactacaatttttttgtctaaagagtaatactagagataaacataaaaaatgtagaggtcgagtttagatgcaagttcaaggagcgaaaggtggatgggtaggttatatagggatatagcacagagatatatagcaaagagatacttttgagcaatgtttgtggaagcggtattcgcaatattttagtagctcgttacagtccggtgcgtttttggttttttgaaagtgcgtcttcagagcgcttttggttttcaaaagcgctctgaagttcctatactttctagagaataggaacttcggaataggaacttcaaagcgtttccgaaaacgagcgcttccgaaaatgcaacgcgagctgcgcacatacagctcactgttcacgtcgcacctatatctgcgtgttgcctgtatatatatatacatgagaagaacggcatagtgcgtgtttatgcttaaatgctcctactttaccgacgtcaggctacgtccatgatcgttcgggccgcgttgctggcgtttttccataggctccgcccccctgacgagcatcacaaaaatcgacgctcaagtcagaggtggcgaaacccgacaggactataaagataccaggcgtttccccctggaagctccctcgtgcgctctcctgttccgaccctgccgcttaccggatacctgtccgcctttctcccttcgggaagcgtggcgctttctcaatgctcacgctgtaggtatctcagttcggtgtaggtcgttcgctccaagctgggctgtgtgcacgaaccccccgttcagcccgaccgctgcgccttatccggtaactatcgtcttgagtccaacccggtaagacacgacttatcgccactggcagcagccactggtaacaggattagcagagcgaggtatgtaggcggtgctacagagttcttgaagtggtggcctaactacggctacactagaaggacagtatttggtatctgcgctctgctgaagccagttaccttcggaaaaagagttggtagctcttgatccggcaaacaaaccaccgctggtagcggtggtttttttgtttgcaagcagcagattacgcgcagaaaaaaaggatctcaagaagatcctttgatcttttctacggggtctgacgctcagtggaacgaaaactcacgttaagggattttggtcatgaaggaatactctgaataaaacaacttatataataaaaatgcgg

SEQ ID NO: 423 - DNA, 1093 bp, Artificial Sequence
  Expression cassette for csOAC in PLAS182. Gal1p:csOAC:Cyc1t
  exon (511)..(816): CDS for C. sativa olivetolic acid synthase
cggattagaagccgccgagcgggtgacagccctccgaaggaagactctcctccgtgcgtcctcgtcttcaccggtcgcgttcctgaaacgcagatgtgcctcgcgccgcactgctccgaacaataaagattctacaatactagcttttatggttatgaagaggaaaaattggcagtaacctggccccacaaaccttcaaatgaacgaatcaaattaacaaccataggatgataatgcgattagttttttagccttatttctggggtaattaatcagcgaagcgatgatttttgatctattaacagatatataaatgcaaaaactgcataaccactttaactaatactttcaacattttcggtttgtattacttcttattcaaatgtaataaaagtatcaacaaaaaattgttaatatacctctatactttaacgtcaaggagaaaaaaccccggatcggactactagcagctgtaatacgactcactatagggaatattaagcttaaacaatggccgtcaagcacttgatcgtcttaaagtttaaggacgagatcactgaagcccaaaaggaagaattcttcaaaacttacgttaacttggttaacatcattcctgctatgaaggacgtctactggggtaaggatgtcactcaaaaaaacaaggaagaaggttatacccacatcgttgaagtcaccttcgaatctgttgaaactattcaagactacatcattcacccagctcacgtcggtttcggtgatgtttacagatctttctgggaaaaattgttgatcttcgactacaccccaagaaagggctaactcgagcatgcatctagagggccgcatcatgtaattagttatgtcacgcttacattcacgccctccccccacatccgctctaaccgaaaaggaaggagttagacaacctgaagtctaggtccctatttatttttttatagttatgttagtattaagaacgttatttatatttcaaatttttcttttttttctgtacagacgcgtgtacgcatgtaacattatactgaaaaccttgcttgagaaggttttgggacgctcgaaggctttaatttgc

SEQ ID NO: 424 - DNA, 5058 bp, Artificial Sequence
  Backbone for pGAL (PLAS251)
ggccctgcattaatgaatcggccaacgcgcggggagaggcggtttgcgtattgggcgctcttccgcttcctcgctcactgactcgctgcgctcggtcgttcggctgcggcgagcggtatcagctcactcaaaggcggtaatacggttatccacagaatcaggggataacgcaggaaagaacatgtgagcaaaaggccagcaaaagcccaggaaccgtaaaaaggccgcgttgctggcgtttttccataggctccgcccccctgacgagcatcacaaaaatcgacgctcaagtcagaggtggcgaaacccgacaggactataaagataccaggcgtttccccctggaagctccctcgtgcgctctcctgttccgaccctgccgcttaccggatacctgtccgcctttctcccttcgggaagcgtggcgctttctcatagctcacgctgtaggtatctcagttcggtgtaggtcgttcgctccaagctgggctgtgtgcacgaaccccccgttcagcccgaccgctgcgccttatccggtaactatcgtcttgagtccaacccggtaagacacgacttatcgccactggcagcagccactggtaacaggattagcagagcgaggtatgtaggcggtgctacagagttcttgaagtggtggcctaactacggctacactagaaggacagtatttggtatctgcgctctgctgaagccagttaccttcggaaaaagagttggtagctcttgatccggcaaacaaaccaccgctggtagcggtggtttttttgtttgcaagcagcagattacgcgcagaaaaaaaggatctcaagaagatcctttgatcttttctacggggtctgacgctcagtggaacgaaaactcacgttaagggattttggtcatgagattatcaaaaaggatcttcacctagatccttttaaattaaaaatgaagttttaaatcaatctaaagtatatatgagtaaacttggtctgacagttaccaatgcttaatcagtgaggcacctatctcagcgatctgtctatttcgttcatccatagttgcctgactccccgtcgtgtagataactacgatacgggagcgcttaccatctggccccagtgctgcaatgataccgcgagacccacgctcaccggctccagatttatcagcaataaaccagccagccggaagggccgagcgcagaagtggtcctgcaactttatccgcctccattcagtctattaattgttgccgggaagctagagtaagtagttcgccagttaatagtttgcgcaacgttgttggcattgctacaggcatcgtggtgtcactctcgtcgtttggtatggcttcattcagctccggttcccaacgatcaaggcgagttacatgatcccccatgttgtgcaaaaaagcggttagctccttcggtcctccgatcgttgtcagaagtaagttggccgcagtgttatcactcatggttatggcagcactgcataattctcttactgtcatgccatccgtaagatgcttttctgtgactggtgagtactcaaccaagtcattctgagaatagtgtatgcggcgaccgagttgctcttgcccggcgtcaatacgggataatagtgtatcacatagcagaactttaaaagtgctcatcattggaaaacgttcttcggggcgaaaactctcaaggatcttaccgctgttgagatccagttcgatgtaacccactcgtgcacccaactgatcttcagcatcttttactttcaccagcgtttctgggtgagcaaaaacaggaaggcaaaatgccgcaaaaaagggaataagggcgacacggaaatgttgaatactcatactcttcctttttcaatgggtaataactgatataattaaattgaagctctaatttgtgagtttagtatacatgcatttacttataatacagttttttagttttgctggccgcatcttctcaaatatgcttcccagcctgcttttctgtaacgttcaccctctaccttagcatcccttccctttgcaaatagtcctcttccaacaataataatgtcagatcctgtagagaccacatcatccacggttctatactgttgacccaatgcgtctcccttgtcatctaaacccacaccgggtgtcataatcaaccaatcgtaaccttcatctcttccacccatgtctctttgagcaataaagccgataacaaaatctttgtcgctcttcgcaatgtcaacagtacccttagtatattctccagtagatagggagcccttgcatgacaattctgctaacatcaaaaggcctctaggttcctttgttacttcttctgccgcctgcttcaaaccgctaacaatacctgggcccaccacaccgtgtgcattcgtaatgtctgcccattctgctattctgtatacacccgcagagtactgcaatttgactgtattaccaatgtcagcaaattttctgtcttcgaagagtaaaaaattgtacttggcggataatgcctttagcggcttaactgtgccctccatggaaaaatcagtcaagatatccacatgtgtttttagtaaacaaattttgggacctaatgcttcaactaactccagtaattccttggtggtacgaacatccaatgaagcacacaagtttgtttgcttttcgtgcatgatattaaatagcttggcagcaacaggactaggatgagtagcagcacgttccttatatgtagctttcgacatgatttatcttcgtttcctgcaggtttttgttctgtgcagttgggttaagaatactgggcaatttcatgtttcttcaacactacatatgcgtatatataccaatctaagtctgtgctccttccttcgttcttccttctgttcggagattaccgaatcaaaaaaatttcaaagaaaccgaaatcaaaaaaaagaataaaaaaaaaatgatgaattgaattgaaaagctagcttatcgatgataagctgtcaaagatgagaattaattccacggactatagactatactagatactccgtctactgtacgatacacttccgctcaggtccttgtcctttaacgaggccttaccactcttttgttactctattgatccagctcagcaaaggcagtgtgatctaagattctatcttcgcgatgtagtaaaactagctagaccgagaaagagactagaaatgcaaaaggcacttctacaatggctgccatcattattatccgatgtgacgctgcagcttctcaatgatattcgaatacgctttgaggagatacagcctaatatccgacaaactgttttacagatttacgatcgtacttgttacccatcattgaattttgaacatccgaacctgggagttttccctgaaacagatagtatatttgaacctgtataataatatatagtctagcgctttacggaagacaatgtatgtatttcggttcctggagaaactattgcatctattgcataggtaatcttgcacgtcgcatccccggttcattttctgcgtttccatcttgcacttcaatagcatatctttgttaacgaagcatctgtgcttcattttgtagaacaaaaatgcaacgcgagagcgctaatttttcaaacaaagaatctgagctgcatttttacagaacagaaatgcaacgcgaaagcgctattttaccaacgaagaatctgtgcttcatttttgtaaaacaaaaatgcaacgcgacgagagcgctaatttttcaaacaaagaatctgagctgcatttttacagaacagaaatgcaacgcgagagcgctattttaccaacaaagaatctatacttcttttttgttctacaaaaatgcatcccgagagcgctatttttctaacaaagcatcttagattactttttttctcctttgtgcgctctataatgcagtctcttgataactttttgcactgtaggtccgttaaggttagaagaaggctactttggtgtctattttctcttccataaaaaaagcctgactccacttcccgcgtttactgattactagcgaagctgcgggtgcattttttcaagataaaggcatccccgattatattctataccgatgtggattgcgcatactttgtgaacagaaagtgatagcgttgatgattcttcattggtcagaaaattatgaacggtttcttctattttgtctctatatactacgtataggaaatgtttacattttcgtattgttttcgattcactctatgaatagttcttactacaatttttttgtctaaagagtaatactagagataaacataaaaaatgtagaggtcgagtttagatgcaagttcaaggagcgaaaggtggatgggtaggttatatagggatatagcacagagatatatagcaaagagatacttttgagcaatgtttgtggaagcggtattcgcaatgggaagctccaccccggttgataatcagaaaagccccaaaaacaggaagattgtataagcaaatatttaaattgtaaacgttaatattttgttaaaattcgcgttaaatttttgttaaatcagctcattttttaacgaatagcccgaaatcggcaaaatcccttataaatcaaaagaatagaccgagatagggttgagtgttgttccagtttccaacaagagtccactattaaagaacgtggactccaacgtcaaagggcgaaaaagggtctatcagggcgatggcccactacgtgaaccatcaccctaatcaagttttttggggtcgaggtgccgtaaagcagtaaatcggaagggtaaacggatgcccccatttagagcttgacggggaaagccggcgaacgtggcgagaaaggaagggaagaaagcgaaaggagcgggggctagggcggtgggaagtgtaggggtcacgctgggcgtaaccaccacacccgccgcgcttaatggggcgctacagggcgcgtggggatgatccactcccggatcggactactagcagctgtaatacgactcactatagggaatattaagcttaaaca

SEQ ID NO: 425 - DNA, 2435 bp, Artificial Sequence
  Expression cassette for OXC53 in PLAS251. Gal1p:THCaSynthase:Cyc1t
  exon (587)..(2140): CDS for C. sativa tetrahydrocannabinolic acid synthase
agtacggattagaagccgccgagcgggtgacagccctccgaaggaagactctcctccgtgcgtcctcgtcttcaccggtcgcgttcctgaaacgcagatgtgcctcgcgccgcactgctccgaacaataaagattctacaatactagcttttatggttatgaagaggaaaaattggcagtaacctggccccacaaaccttcaaatgaacgaatcaaattaacaaccataggatgataatgcgattagttttttagccttatttctggggtaattaatcagcgaagcgatgatttttgatctattaacagatatataaatgcaaaaactgcataaccactttaactaatactttcaacattttcggtttgtattacttcttattcaaatgtaataaaagtatcaacaaaaaattgttaatatacctctatactttaacgtcaaggagaaaaaaccccggatcggactactagcagctgtaatacgactcactatagggaatattaagcttaaacaatgatttttgatggtactactatgtctattgctattggtttgttgtctactttgggtattggtgctgaagctatgccaagagaaaacttcttgaagtgtttctctaagcatatcccaaacaacgttgctaacccaaagttggtctatactcaacacgatcaattgtatatgtctattttgaactctactattcaaaatttgagattcatttctgataccaccccaaaaccattggtcattgtcactccttccaacaactcccatatccaagctactattttgtgttctaagaaggtcggtttgcaaatcagaaccagatctggtggtcacgatgccgagggtatgtcctacatttctcaagttccttttgtcgttgttgatttgagaaacatgcactccatcaaaattgatgttcactcccaaaccgcctgggtcgaagctggtgccactttgggtgaagtctactactggattaatgaaaagaatgaaaatttgtccttcccaggtggttactgtccaaccgttggtgttggtggtcacttctccggtggtggttacggtgctttgatgagaaactacggtttagctgctgataacattatcgacgcccacttggttaatgttgatggtaaagtcttggacagaaaatctatgggtgaagatttgttttgggccattagaggtggtggtggtgagaacttcggtatcattgctgcctggaagatcaaattggttgctgttccatctaagtccactattttttccgttaagaagaacatggaaatccatggtttagttaaattatttaacaagtggcaaaacattgcctacaagtacgataaagatttggttttgatgacccatttcattactaagaatattactgacaatcacggtaagaacaagactaccgttcacggttacttctcttctattttccacggtggtgtcgactccttagttgatttgatgaacaaatcctttccagagttgggtattaagaagactgattgtaaggaattctcttggattgacaccaccatcttctactctggtgtcgtcaactttaacactgccaactttaagaaggaaattttattggatagatccgctggtaagaagaccgctttttccatcaaattggattacgtcaagaagccaatccctgagactgccatggtcaagatcttggaaaagttgtatgaagaagacgttggtgctggtatgtacgttttatatccatacggtggtattatggaagagatttccgaatccgctattccattcccacatagagctggtatcatgtacgaattgtggtacactgcttcttgggaaaaacaagaagataatgaaaagcatattaactgggttagatccgtttacaacttcaccactccatatgtttctcaaaacccaagattggcttacttgaactatagagatttggatttgggtaagactaaccacgcctctccaaacaattacactcaagctagaatctggggtgaaaaatacttcggtaagaacttcaacagattagtcaaagtcaagaccaaagttgacccaaacaacttcttcagaaacgagcaatccattcctccattgcctccacaccatcacggccatcatcaccatcaccattagctcgagcatgcatctagagggccgcatcatgtaattagttatgtcacgcttacattcacgccctccccccacatccgctctaaccgaaaaggaaggagttagacaacctgaagtctaggtccctatttatttttttatagttatgttagtattaagaacgttatttatatttcaaatttttcttttttttctgtacagacgcgtgtacgcatgtaacattatactgaaaaccttgcttgagaaggttttgggacgctcgaaggctttaatttgc

SEQ ID NO: 426 - DNA, 3564 bp, Artificial Sequence; identical to SEQ ID NO: 2
  Cassette with Aspergillus nidulans NpgA coding sequence, regulatory sequences and integration sequences
  exon (1170)..(2201): CDS for NpgA

SEQ ID NO: 427 - DNA, 11114 bp, Artificial Sequence; identical to SEQ ID NO: 3
  Cassette with Dictyostelium discoideum DiPKS(G1516R) coding sequence, regulatory sequences and integration sequences for USER Site XII-1 Integration
  exon (849)..(10292): CDS for DiPKS(G1516R)

SEQ ID NO: 428 - DNA, 10890 bp, Artificial Sequence; identical to SEQ ID NO: 4
  Cassette with Dictyostelium discoideum DiPKS(G1516R) coding sequence, regulatory sequences and integration sequences for Wu Site 1 Integration
  exon (717)..(10160): CDS for DiPKS(G1516R)

SEQ ID NO: 429 - DNA, 11300 bp, Artificial Sequence; identical to SEQ ID NO: 5
  Cassette with Dictyostelium discoideum DiPKS(G1516R) coding sequence, regulatory sequences and integration sequences for Wu Site 3 Integration
  exon (795)..(10238): CDS for DiPKS(G1516R)

SEQ ID NO: 430 - DNA, 11140 bp, Artificial Sequence; identical to SEQ ID NO: 6
  Cassette with Dictyostelium discoideum DiPKS(G1516R) coding sequence, regulatory sequences and integration sequences for Wu Site 6 Integration
  exon (794)..(10237): CDS for DiPKS(G1516R)

SEQ ID NO: 431 - DNA, 11637 bp, Artificial Sequence; identical to SEQ ID NO: 7
  Cassette with Dictyostelium discoideum DiPKS(G1516R) coding sequence, regulatory sequences and integration sequences for Wu Site 18 Integration
  exon (1172)..(10615): CDS for DiPKS(G1516R)

SEQ ID NO: 432 - DNA, 7114 bp, Artificial Sequence; identical to SEQ ID NO: 8
  Cassette with coding sequences for S. cerevisiae ALD6 and S. enterica AscL641P, regulatory sequences and integration sequences for Flagfeldt Site 19 Integration
  exon (1444)..(2949): CDS for Ald6
  exon (3888)..(5843): CDS for ACS

SEQ ID NO: 433 - DNA, 3256 bp, Artificial Sequence; identical to SEQ ID NO: 9
  Cassette with S. cerevisiae Maf1 coding sequence, regulatory sequences and integration sequences for Flagfeldt Site 5 Integration
  exon (936)..(2123): CDS for Maf1

SEQ ID NO: 434 - DNA, 4254 bp, Artificial Sequence; identical to SEQ ID NO: 10
  Cassette with Erg20(K197E) coding sequence, regulatory sequences and integration sequences for chromosomal modification.
  exon (2683)..(3423): CDS for Erg20(K197E)

SEQ ID NO: 435 - DNA, 3503 bp, Artificial Sequence; identical to SEQ ID NO: 11
  Cassette with Erg20 coding sequence, sterol-responsive regulatory sequences and integration sequences for Flagfeldt Site 18 Integration
  exon (1364)..(2701): CDS for Erg20

SEQ ID NO: 436 - DNA, 4843 bp, Artificial Sequence; identical to SEQ ID NO: 12
  Cassette with tHMGr and IDI coding sequence, regulatory sequences and integration sequences for USER Site X-3 Integration
  exon (877)..(2385): CDS for tHMGR1
  exon (3209)..(4075): CDS for IDI1

SEQ ID NO: 437 - DNA, 7673 bp, Artificial Sequence; identical to SEQ ID NO: 13
  Cassette with Saccharomyces cerevisiae Acc1 (S659A; S1167A) coding sequence, PGK1 promoter and other regulatory sequences, and integration sequence for chromosomal modification
  promoter (222)..(971): PGK1
  exon (972)..(7673): Acc1(S659A; S1157A)

SEQ ID NO: 438 - protein, 333 aa, Artificial Sequence; identical to SEQ ID NO: 407
  PT72

SEQ ID NO: 439 - protein, 329 aa, Artificial Sequence
  PT273 aa sequence
MSPKVSSMPYTNPRYESGPLSLIPKSIVPYFELMRFELPHGYYLGYFPHLVGIMYGASAGPERLPARDLVFQALLYVGWTFAMRGAGCAWNDNIDQDFDRKTERCRTRPIARGAVSTTAGHIFAVAGVALAFLCLSPLPTECHQLGVLVTVLSVIYPFCKRFTNFAQVILGMTLAANFILAAYGAGLPALEQPYTRPTMFATLAITLLVVFYDVVYARQDTADDLKSGVKGMAVLFRNHIEVLLAVLTCTIGGLLAATGVSVGNGPYYFLFSVAGLTVALLAMIGGIRYRIFHTWNGYSGWFYVLAIINLMSGYFIEYLDNAPILARGS

SEQ ID NO: 440 - protein, 329 aa, Artificial Sequence; identical to SEQ ID NO: 410
  PT295

SEQ ID NO: 441 - DNA, 3564 bp, Artificial Sequence; identical to SEQ ID NO: 2
  NpgA

SEQ ID NO: 442 - DNA, 11114 bp, Artificial Sequence; identical to SEQ ID NO: 3
  DiPKS-1

SEQ ID NO: 443 - DNA, 10890 bp, Artificial Sequence; identical to SEQ ID NO: 4
  DiPKS-2

SEQ ID NO: 444 - DNA, 11300 bp, Artificial Sequence; identical to SEQ ID NO: 5
  DiPKS3

SEQ ID NO: 445 - DNA, 11140 bp, Artificial Sequence; identical to SEQ ID NO: 6
  DiPKS-4

SEQ ID NO: 446 - DNA, 11637 bp, Artificial Sequence; identical to SEQ ID NO: 7
  DiPKS-5

SEQ ID NO: 447 - DNA, 7114 bp, Artificial Sequence; identical to SEQ ID NO: 8
  PDH

SEQ ID NO: 448 - DNA, 3256 bp, Artificial Sequence; identical to SEQ ID NO: 9
  Maf1

SEQ ID NO: 449 - DNA, 4538 bp, Artificial Sequence; identical to SEQ ID NO: 276
  Erg20K197E

SEQ ID NO: 450 - DNA, 3503 bp, Artificial Sequence; identical to SEQ ID NO: 11
  Erg1p:UB14-Erg20:deg

SEQ ID NO: 451 - DNA, 4859 bp, Artificial Sequence; identical to SEQ ID NO: 277
  tHMGr-IDI

SEQ ID NO: 452 - DNA, 7673 bp, Artificial Sequence
  PGK1p:ACC1S659A,S1157A
caagtcgcagtcgaaattcaaccgctcattgccactctctctactgcttggtgaactaggctatacgctcaatcagcgccaagatatataagaagaacagcactcccagtcgtattctggcacagtatagcctagcacaatcactgtcacaattgttatcggttctacaattgttctgctctcttcaattttcctttccttattctactctttttatccctacgcacagatattataacatctgcataataggcatttgcaagaattactcgtgagtaaggaaagagtgaggaactatcgcatacctgcatttaaagatgccgatttgggcgcgaatcctttattttggcttcaccctcatactattatcagggccagaaaaaggaagtgtttccctccttcttgaattgatgttaccctcataaagcacgtggcctcttatcgagaaagaaattaccgtcgctcgtgatttgtttgcaaaaagaacaaaactgaaaaaacccagacacgctcgacttcctgtcttcctattgattgcagcttccaatttcgtcacacaacaaggtcctagcgacggctcacaggttttgtaacaagcaatcgaaggttctggaatggcgggaaagggtttagtaccacatgctatgatgcccactgtgatctccagagcaaagttcgttcgatcgtactgttactctctctctttcaaacagaattgtccgaatcgtgtgacaacaacagcctgttctcacacactcttttcttctaaccaagggggtggtttagtttagtagaacctcgtgaaacttacatttacatatatataaacttgcataaattggtcaatgcaagaaatacatatttggtcttttctaattcgtagtttttcaagttcttagatgctttctttttctcttttttacagatcatcaaggaagtaattatctactttttacaacaaatataaaacaatgagcgaagaaagcttattcgagtcttctccacagaagatggagtacgaaattacaaactactcagaaagacatacagaacttccaggtcatttcattggcctcaatacagtagataaactagaggagtccccgttaagggactttgttaagagtcacggtggtcacacggtcatatccaagatcctgatagcaaataatggtattgccgccgtgaaagaaattagatccgtcagaaaatgggcatacgagacgttcggcgatgacagaaccgtccaattcgtcgccatggccaccccagaagatctggaggccaacgcagaatatatccgtatggccgatcaatacattgaagtgccaggtggtactaataataacaactacgctaacgtagacttgatcgtagacatcgccgaaagagcagacgtagacgccgtatgggctggctggggtcacgcctccgagaatccactattgcctgaaaaattgtcccagtctaagaggaaagtcatctttattgggcctccaggtaacgccatgaggtctttaggtgataaaatctcctctaccattgtcgctcaaagtgctaaagtcccatgtattccatggtctggtaccggtgttgacaccgttcacgtggacgagaaaaccggtctggtctctgtcgacgatgacatctatcaaaagggttgttgtacctctcctgaagatggtttacaaaaggccaagcgtattggttttcctgtcatgattaaggcatccgaaggtggtggtggtaaaggtatcagacaagttgaacgtgaagaagatttcatcgctttataccaccaggcagccaacgaaattccaggctcccccattttcatcatgaagttggccggtagagcgcgtcacttggaagttcaactgctagcagatcagtacggtacaaatatttccttgttcggtagagactgttccgttcagagacgtcatcaaaaaattatcgaagaagcaccagttacaattgccaaggctgaaacatttcacgagatggaaaaggctgccgtcagactggggaaactagtcggttatgtctctgccggtaccgtggagtatctatattctcatgatgatggaaaattctactttttagaattgaacccaagattacaagtcgagcatccaacaacggaaatggtctccggtgttaacttacctgcagctcaattacaaatcgctatgggtatccctatgcatagaataagtgacattagaactttatatggtatgaatcctcattctgcctcagaaatcgatttcgaattcaaaactcaagatgccaccaagaaacaaagaagacctattccaaagggtcattgtaccgcttgtcgtatcacatcagaagatccaaacgatggattcaagccatcgggtggtactttgcatgaactaaacttccgttcttcctctaatgtttggggttacttctccgtgggtaacaatggtaatattcactccttttcggactctcagttcggccatatttttgcttttggtgaaaatagacaagcttccaggaaacacatggttgttgccctgaaggaattgtccattaggggtgatttcagaactactgtggaatacttgatcaaacttttggaaactgaagatttcgaggataacactattaccaccggttggttggacgatttgattactcataaaatgaccgctgaaaagcctgatccaactcttgccgtcatttgcggtgccgctacaaaggctttcttagcatctgaagaagcccgccacaagtatatcgaatccttacaaaagggacaagttctatctaaagacctactgcaaactatgttccctgtagattttatccatgagggtaaaagatacaagttcaccgtagctaaatccggtaatgaccgttacacattatttatcaatggttctaaatgtgatatcatactgcgtcaactatctgatggtggtcttttgattgccataggcggtaaatcgcataccatctattggaaagaagaagttgctgctacaagattatccgttgactctatgactactttgttggaagttgaaaacgatccaacccagttgcgtactccatcccctggtaaattggttaaattcttggtggaaaatggtgaacacattatcaagggccaaccatatgcagaaattgaagttatgaaaatgcaaatgcctttggtttctcaagaaaatggtatcgtccagttattaaagcaacctggttctaccattgttgcaggtgatatcatggctattatgactcttgacgatccatccaaggtcaagcacgctctaccatttgaaggtatgctgccagattttggttctccagttatcgaaggaaccaaacctgcctataaattcaagtcattagtgtctactttggaaaacattttgaagggttatgacaaccaagttattatgaacgcttccttgcaacaattgatagaggttttgagaaatccaaaactgccttactcagaatggaaactacacatctctgctttacattcaagattgcctgctaagctagatgaacaaatggaagagttagttgcacgttctttgagacgtggtgctgttttcccagctagacaattaagtaaattgattgatatggccgtgaagaatcctgaatacaaccccgacaaattgctgggcgccgtcgtggaaccattggcggatattgctcataagtactctaacgggttagaagcccatgaacattctatatttgtccatttcttggaagaatattacgaagttgaaaagttattcaatggtccaaatgttcgtgaggaaaatatcattctgaaattgcgtgatgaaaaccctaaagatctagataaagttgcgctaactgttttgtctcattcgaaagtttcagcgaagaataacctgatcctagctatcttgaaacattatcaaccattgtgcaagttatcttctaaagtttctgccattttctctactcctctacaacatattgttgaactagaatctaaggctaccgctaaggtcgctctacaagcaagagaaattttgattcaaggcgctttaccttcggtcaaggaaagaactgaacaaattgaacatatcttaaaatcctctgttgtgaaggttgcctatggctcatccaatccaaagcgctctgaaccagatttgaatatcttgaaggacttgatcgattctaattacgttgtgttcgatgttttacttcaattcctaacccatcaagacccagttgtgactgctgcagctgctcaagtctatattcgtcgtgcttatcgtgcttacaccataggagatattagagttcacgaaggtgtcacagttccaattgttgaatggaaattccaactaccttcagctgcgttctccacctttccaactgttaaatctaaaatgggtatgaacagggctgtttctgtttcagatttgtcatatgttgcaaacagtcagtcatctccgttaagagaaggtattttgatggctgtggatcatttagatgatgttgatgaaattttgtcacaaagtttggaagttattcctcgtcaccaatcttcttctaacggacctgctcctgatcgttctggtagctccgcatcgttgagtaatgttgctaatgtttgtgttgcttctacagaaggtttcgaatctgaagaggaaattttggtaaggttgagagaaattttggatttgaataagcaggaattaatcaatgcttctatccgtcgtatcacatttatgttcggttttaaagatgggtcttatccaaagtattatacttttaacggtccaaattataacgaaaatgaaacaattcgtcacattgagccggctttggccttccaactggaattaggaagattgtccaacttcaacattaaaccaattttcactgataatagaaacatccatgtctacgaagctgttagtaagacttctccattggataagagattctttacaagaggtattattagaacgggtcatatccgtgatgacatttctattcaagaatatctgacttctgaagctaacagattgatgagtgatatattggataatttagaagtcaccgacacttcaaattctgatttgaatcatatcttcatcaacttcattgcggtgtttgatatctctccagaagatgtcgaagccgccttcggtggtttcttagaaagatttggtaagagattgttgagattgcgtgtttcttctgccgaaattagaatcatcatcaaagatcctcaaacaggtgccccagtaccattgcgtgccttgatcaataacgtttctggttatgttatcaaaacagaaatgtacaccgaagtcaagaacgcaaaaggtgaatgggtatttaagtctttgggtaaacctggatccatgcatttaagacctattgctactccttaccctgttaaggaatggttgcaaccaaaacgttataaggcacacttgatgggtaccacatatgtctatgacttcccagaattattccgccaagcatcgtcatcccaatggaaaaatttctctgcagatgttaagttaacagatgatttctttatttccaacgagttgattgaagatgaaaacggcgaattaactgaggtggaaagagaacctggtgccaacgctattggtatggttgcctttaagattactgtaaagactcctgaatatccaagaggccgtcaatttgttgttgttgctaacgatatcacattcaagatcggttcctttggtccacaagaagacgaattcttcaataaggttactgaatatgctagaaagcgtggtatcccaagaatttacttggctgcaaactcaggtgccagaattggtatggctgaagagattgttccactatttcaagttgcatggaatgatgctgccaatccggacaagggcttccaatacttatacttaacaagtgaaggtatggaaactttaaagaaatttgacaaagaaaattctgttctcactgaacgtactgttataaacggtgaagaaagatttgtcatcaagacaattattggttctgaagatgggttaggtgtcgaatgtctacgtggatctggtttaattgctggtgcaacgtcaagggcttaccacgatatcttcactatcaccttagtcacttgtagatccgtcggtatcggtgcttatttggttcgtttgggtcaaagagctattcaggtcgaaggccagccaattattttaactggtgctcctgcaatcaacaaaatgctgggtagagaagtttatacttctaacttacaattgggtggtactcaaatcatgtataacaacggtgtttcacatttgactgctgttgacgatttagctggtgtagagaagattgttgaatggatgtcttatgttccagccaagcgtaatatgccagttcctatcttggaaactaaagacacatgggatagaccagttgatttcactccaactaatgatgaaacttacgatgtaagatggatgattgaaggtcgtgagactgaaagtggatttgaatatggtttgtttgataaagggtctttctttgaaactttgtcaggatgggccaaaggtgttgtcgttggtagagcccgtcttggtggtattccactgggtgttattggtgttgaaacaagaactgtcgagaacttgattcctgctgatccagctaatccaaatagtgctgaaacattaattcaagaacctggtcaagtttggcatccaaactccgccttcaagactgctcaagctatcaatgactttaacaacggtgaacaattgccaatgatgattttggccaactggagaggtttctctggtggtcaacgtgatatgttcaacgaagtcttgaagtatggttcgtttattgttgacgcattggtggattacaaacaaccaattattatctatatcccacctaccggtgaactaagaggtggttcatgggttgttgtcgatccaactatcaacgctgaccaaatggaaatgtatgccgacgtcaacgctagagctggtgttttggaaccacaaggtatggttggtatcaagttccgtagagaaaaattgctggacaccatgaacagattggatgacaagtacagagaattgagatctcaattatccaacaagagtttggctccagaagtacatcagcaaatatccaagcaattagctgatcgtgagagagaactattgccaatttacggacaaatcagtcttcaatttgctgatttgcacgataggtcttcacgtatggtggccaagggtgttatttctaaggaactggaatggaccgaggcacgtcgtttcttcttctggagattgagaagaagattgaacgaagaatatttgattaaaaggttgagccatcaggtaggcgaagcatcaagattagaaaagatcgcaagaattagatcgtggtaccctgcttcagtggaccatgaagatgataggcaagtcgcaacatggattgaagaaaactacaaaactttggacgataaactaaagggtttgaaattagagtcattcgctcaagacttagctaaaaagatcagaagcgaccatgacaatgctattgatggattatctgaagttatcaagatgttatctaccgatgataaagaaaaattgttgaagactttgaaataa

SEQ ID NO: 453 - DNA, 2177 bp, Artificial Sequence; identical to SEQ ID NO: 14
  OAC

SEQ ID NO: 454 - DNA, 6775 bp, Artificial Sequence; identical to SEQ ID NO: 116
  PLAS384

SEQ ID NO: 455 - DNA, 6787 bp, Artificial Sequence; identical to SEQ ID NO: 115
  PLAS411

SEQ ID NO: 456 - DNA, 6484 bp, Artificial Sequence; identical to SEQ ID NO: 114
  PLAS400

SEQ ID NO: 457 - DNA, 6775 bp, Artificial Sequence; identical to SEQ ID NO: 108
  PLAS414

SEQ ID NO: 458 - DNA, 8980 bp, Artificial Sequence; identical to SEQ ID NO: 18
  PLAS36

SEQ ID NO: 459 - DNA, 1002 bp, Artificial Sequence
  PT72 DNA
atgccagctacgaggactcccatccaccccgaagcggcggcttacaagaacccccgttaccagtcaggtcccttaagtgtaataccaaagtcatttgttccctactgcgagttgatgaggttggaattgcctcatggtaattttcttggttacttcccgcacctagttgggctactatacggctctagcgcgtcaccagccaggttaccagctaacgaggttgcgttccaagcggttttatacattggttggacgttctttatgagaggcgcgggttgcgcgtggaacgatgtcgttgatcaagactttgatcgtaaaaccacccgttgcagagtgaggccagtcgcaagaggggcggtcagcactacaagtgcaaacatttttggtttcgcaatggtggctttggcttttgcctgtatctcaccccttccagccgagtgccaaaggcttgggttaatgaccacagttttatccattatctatcctttctgcaagagggttacaaattttgctcaggtgattttaggtatgacactggcaattaacttcatattggctgcttatggcgcgggccttcctgctatagaggctccgtacactgtgcccacaatttgcgtcacaacagcaattaccctgctagtggtattttacgatgtggtctatgcgaggcaagacaccgctgacgacttaaaaagtggggtgaaaggcatggcagtgcttttccgtaactatgtcgagattctactaacatctatcacgttagttattgctggtcttattgctacgacgggggttctggttgacaacggtccgtatttttttgtctttagcgttgcggggttacttgctgctttattggcgatgatcggaggcataaggtacaggatttttcacacatggaactcctactcaggctggttttacgcgcttgctatctttaaccttctagggggctacttgattgagtacttggaccaagtgccgatgctaaataaagcgtga

SEQ ID NO: 460 - DNA, 990 bp, Artificial Sequence
  PT273 aa
atgagccccaaagtatccagcatgccctacacaaatcctagatacgagagcgggccattatccttgatccctaaatccatcgtaccgtatttcgaacttatgaggttcgaactaccacacggttactatctagggtattttcctcacttagtgggaataatgtacggagcttcagcgggtcccgaacgtctaccagctagggatcttgtttttcaagcgttattatacgtgggatggacttttgccatgcgtggagcagggtgtgcctggaacgataacatcgaccaggacttcgatcgtaagacagagaggtgcaggacaagacctatcgcacgtggggccgtgtctacaactgctgggcatatttttgccgtcgcaggcgttgcactagcatttttgtgcctaagcccattaccgaccgagtgccaccaacttggtgttttggttacggtcctaagtgtaatatatccattctgtaagagatttacgaactttgctcaggttattttgggtatgacattagcggcaaattttattttagctgcatatggagctgggcttcccgctttggagcaaccatataccaggccgactatgtttgcaactcttgcgatcacattgttagtagttttctacgacgtggtctacgcaaggcaggacaccgctgacgatttaaagagcggtgtaaaaggcatggccgtactgttccgtaatcacatcgaggtcctgttggctgttttaacatgcactattggaggactgctggcagcaacaggcgtgtccgttggcaatggaccctattattttctattctcagtagcgggtttaactgtagcattactagccatgataggtggaatccgttacaggatatttcatacgtggaatgggtacagtggatggttttatgtcttagctataataaaccttatgtccggttattttatcgagtacttagataacgcacccatactggcacgtgggtcctga

SEQ ID NO: 461 - DNA, 990 bp, Artificial Sequence
  PT296 nucl seq
atgagcgcaaaagtgagtcctatggcgtatacgaatccgagatatgaaacgggcccattatcactaattccaaagcccattgttccttattttgagctaatgagattcgaattgccccatgggtattatttaggatatttccctcatcttgtgggtattatgtacggggcgagcgctggtccggagaggctaccggctagggacttagtgtttcaggcgttactgtatgttggttggacttttgcgatgaggggtgccggttgcgcttggaatgataatatcgaccaagatttcgatcgtaagacggaaagatgtagaacgcgtcctattgcaagaggagcggtttctaccacggcgggccacgtcttcgctgtcgccggtgttgctctagctttcttgtgtttgtctccacttccaaccgaatgtcaccaattaggggttttagtcaccgtattgtctgtgatctatcccttttgcaaaagatttactaattttgctcaggtaatacttggaatgactttagctgcaaatttcatcttagccgcttatggcgccggcctacccgcgttagaacagccatataccaggccgacaatgtccgccacgctagctatcacattactagtggtcttttatgacgtggtttatgcgcgtcaggatacagcagatgatcttaaatcaggcgtgaagggaatggccgttttattccgtaatcatattgaagttttattggccgttctaacttgtaccataggtggcttattagcggctaccggggtttcagttggaaatgggccctattacttcttgttctcggtggccggattaacggtggctctgttagctatgatcggaggtataagatacagaatttttcatacatggaatggttattccgggtggttttatgtgttggctatcattaacctaatgtcaggatattttattgagtaccttgataacgctccaattcttgcaagggggagctaa

SEQ ID NO: 462 - protein, 102 aa, Cannabis Sativa; identical to SEQ ID NO: 15

SEQ ID NO: 463 - DNA, 6094 bp, Artificial Sequence
  Plasmid
  exon (1)..(306): CDS for C. sativa olivetolic acid cyclase
atggccgtcaagcacttgatcgtcttaaagtttaaggacgagatcactgaagcccaaaaggaagaattcttcaaaacttacgttaacttggttaacatcattcctgctatgaaggacgtctactggggtaaggatgtcactcaaaaaaacaaggaagaaggttatacccacatcgttgaagtcaccttcgaatctgttgaaactattcaagactacatcattcacccagctcacgtcggtttcggtgatgtttacagatctttctgggaaaaattgttgatcttcgactacaccccaagaaagggctaactcgagcatgcatctagagggccgcatcatgtaattagttatgtcacgcttacattcacgccctccccccacatccgctctaaccgaaaaggaaggagttagacaacctgaagtctaggtccctatttatttttttatagttatgttagtattaagaacgttatttatatttcaaatttttcttttttttctgtacagacgcgtgtacgcatgtaacattatactgaaaaccttgcttgagaaggttttgggacgctcgaaggctttaatttgcggccctgcattaatgaatcggccaacgcgcggggagaggcggtttgcgtattgggcgctcttccgcttcctcgctcactgactcgctgcgctcggtcgttcggctgcggcgagcggtatcagctcactcaaaggcggtaatacggttatccacagaatcaggggataacgcaggaaagaacatgtgagcaaaaggccagcaaaagcccaggaaccgtaaaaaggccgcgttgctggcgtttttccataggctccgcccccctgacgagcatcacaaaaatcgacgctcaagtcagaggtggcgaaacccgacaggactataaagataccaggcgtttccccctggaagctccctcgtgcgctctcctgttccgaccctgccgcttaccggatacctgtccgcctttctcccttcgggaagcgtggcgctttctcatagctcacgctgtaggtatctcagttcggtgtaggtcgttcgctccaagctgggctgtgtgcacgaaccccccgttcagcccgaccgctgcgccttatccggtaactatcgtcttgagtccaacccggtaagacacgacttatcgccactggcagcagccactggtaacaggattagcagagcgaggtatgtaggcggtgctacagagttcttgaagtggtggcctaactacggctacactagaaggacagtatttggtatctgcgctctgctgaagccagttaccttcggaaaaagagttggtagctcttgatccggcaaacaaaccaccgctggtagcggtggtttttttgtttgcaagcagcagattacgcgcagaaaaaaaggatctcaagaagatcctttgatcttttctacggggtctgacgctcagtggaacgaaaactcacgttaagggattttggtcatgagattatcaaaaaggatcttcacctagatccttttaaattaaaaatgaagttttaaatcaatctaaagtatatatgagtaaacttggtctgacagttaccaatgcttaatcagtgaggcacctatctcagcgatctgtctatttcgttcatccatagttgcctgactccccgtcgtgtagataactacgatacgggagcgcttaccatctggccccagtgctgcaatgataccgcgagacccacgctcaccggctccagatttatcagcaataaaccagccagccggaagggccgagcgcagaagtggtcctgcaactttatccgcctccattcagtctattaattgttgccgggaagctagagtaagtagttcgccagttaatagtttgcgcaacgttgttggcattgctacaggcatcgtggtgtcactctcgtcgtttggtatggcttcattcagctccggttcccaacgatcaaggcgagttacatgatcccccatgttgtgcaaaaaagcggttagctccttcggtcctccgatcgttgtcagaagtaagttggccgcagtgttatcactcatggttatggcagcactgcataattctcttactgtcatgccatccgtaagatgcttttctgtgactggtgagtactcaaccaagtcattctgagaatagtgtatgcggcgaccgagttgctcttgcccggcgtcaatacgggataatagtgtatcacatagcagaactttaaaagtgctcatcattggaaaacgttcttcggggcgaaaactctcaaggatcttaccgctgttgagatccagttcgatgtaacccactcgtgcacccaactgatcttcagcatcttttactttcaccagcgtttctgggtgagcaaaaacaggaaggcaaaatgccgcaaaaaagggaataagggcgacacggaaatgttgaatactcatactcttcctttttcaatgggtaataactgatataattaaattgaagctctaatttgtgagtttagtatacatgcatttacttataatacagttttttagttttgctggccgcatcttctcaaatatgcttcccagcctgcttttctgtaacgttcaccctctaccttagcatcccttccctttgcaaatagtcctcttccaacaataataatgtcagatcctgtagagaccacatcatccacggttctatactgttgacccaatgcgtctcccttgtcatctaaacccacaccgggtgtcataatcaaccaatcgtaaccttcatctcttccacccatgtctctttgagcaataaagccgataacaaaatctttgtcgctcttcgcaatgtcaacagtacccttagtatattctccagtagatagggagcccttgcatgacaattctgctaacatcaaaaggcctctaggttcctttgttacttcttctgccgcctgcttcaaaccgctaacaatacctgggcccaccacaccgtgtgcattcgtaatgtctgcccattctgctattctgtatacacccgcagagtactgcaatttgactgtattaccaatgtcagcaaattttctgtcttcgaagagtaaaaaattgtacttggcggataatgcctttagcggcttaactgtgccctccatggaaaaatcagtcaagatatccacatgtgtttttagtaaacaaattttgggacctaatgcttcaactaactccagtaattccttggtggtacgaacatccaatgaagcacacaagtttgtttgcttttcgtgcatgatattaaatagcttggcagcaacaggactaggatgagtagcagcacgttccttatatgtagctttcgacatgatttatcttcgtttcctgcaggtttttgttctgtgcagttgggttaagaatactgggcaatttcatgtttcttcaacactacatatgcgtatatataccaatctaagtctgtgctccttccttcgttcttccttctgttcggagattaccgaatcaaaaaaatttcaaagaaaccgaaatcaaaaaaaagaataaaaaaaaaatgatgaattgaattgaaaagctagcttatcgatgataagctgtcaaagatgagaattaattccacggactatagactatactagatactccgtctactgtacgatacacttccgctcaggtccttgtcctttaacgaggccttaccactcttttgttactctattgatccagctcagcaaaggcagtgtgatctaagattctatcttcgcgatgtagtaaaactagctagaccgagaaagagactagaaatgcaaaaggcacttctacaatggctgccatcattattatccgatgtgacgctgcagcttctcaatgatattcgaatacgctttgaggagatacagcctaatatccgacaaactgttttacagatttacgatcgtacttgttacccatcattgaattttgaacatccgaacctgggagttttccctgaaacagatagtatatttgaacctgtataataatatatagtctagcgctttacggaagacaatgtatgtatttcggttcctggagaaactattgcatctattgcataggtaatcttgcacgtcgcatccccggttcattttctgcgtttccatcttgcacttcaatagcatatctttgttaacgaagcatctgtgcttcattttgtagaacaaaaatgcaacgcgagagcgctaatttttcaaacaaagaatctgagctgcatttttacagaacagaaatgcaacgcgaaagcgctattttaccaacgaagaatctgtgcttcatttttgtaaaacaaaaatgcaacgcgacgagagcgctaatttttcaaacaaagaatctgagctgcatttttacagaacagaaatgcaacgcgagagcgctattttaccaacaaagaatctatacttcttttttgttctacaaaaatgcatcccgagagcgctatttttctaacaaagcatcttagattactttttttctcctttgtgcgctctataatgcagtctcttgataactttttgcactgtaggtccgttaaggttagaagaaggctactttggtgtctattttctcttccataaaaaaagcctgactccacttcccgcgtttactgattactagcgaagctgcgggtgcattttttcaagataaaggcatccccgattatattctataccgatgtggattgcgcatactttgtgaacagaaagtgatagcgttgatgattcttcattggtcagaaaattatgaacggtttcttctattttgtctctatatactacgtataggaaatgtttacattttcgtattgttttcgattcactctatgaatagttcttactacaatttttttgtctaaagagtaatactagagataaacataaaaaatgtagaggtcgagtttagatgcaagttcaaggagcgaaaggtggatgggtaggttatatagggatatagcacagagatatatagcaaagagatacttttgagcaatgtttgtggaagcggtattcgcaatgggaagctccaccccggttgataatcagaaaagccccaaaaacaggaagattgtataagcaaatatttaaattgtaaacgttaatattttgttaaaattcgcgttaaatttttgttaaatcagctcattttttaacgaatagcccgaaatcggcaaaatcccttataaatcaaaagaatagaccgagatagggttgagtgttgttccagtttccaacaagagtccactattaaagaacgtggactccaacgtcaaagggcgaaaaagggtctatcagggcgatggcccactacgtgaaccatcaccctaatcaagttttttggggtcgaggtgccgtaaagcagtaaatcggaagggtaaacggatgcccccatttagagcttgacggggaaagccggcgaacgtggcgagaaaggaagggaagaaagcgaaaggagcgggggctagggcggtgggaagtgtaggggtcacgctgggcgtaaccaccacacccgccgcgcttaatggggcgctacagggcgcgtggggatgatccactagtacggattagaagccgccgagcgggtgacagccctccgaaggaagactctcctccgtgcgtcctcgtcttcaccggtcgcgttcctgaaacgcagatgtgcctcgcgccgcactgctccgaacaataaagattctacaatactagcttttatggttatgaagaggaaaaattggcagtaacctggccccacaaaccttcaaatgaacgaatcaaattaacaaccataggatgataatgcgattagttttttagccttatttctggggtaattaatcagcgaagcgatgatttttgatctattaacagatatataaatgcaaaaactgcataaccactttaactaatactttcaacattttcggtttgtattacttcttattcaaatgtaataaaagtatcaacaaaaaattgttaatatacctctatactttaacgtcaaggagaaaaaaccccggatcggactactagcagctgtaatacgactcactatagggaatattaagcttaaaca

SEQ ID NO: 464 - DNA, 2177 bp, Artificial Sequence; identical to SEQ ID NO: 14
  Cassette with csOAC coding sequence, inducible Gal1 promoter and Eno2 termination sequence
  exon (842)..(1150)

SEQ ID NO: 465 - protein, 3147 aa, Dictyostelium discoideum
MNKNSKIQSPNSSDVAVIGVGFRFPGNSNDPESLWNNLLDGFDAITQVPKERWATSFREMGLIKNKFGGFLKDSEWKNFDPLFFGIGPKEAPFIDPQQRLLLSIVWESLEDAYIRPDELRGSNTGVFIGVSNNDYTKLGFQDNYSISPYTMTGSNSSLNSNRISYCFDFRGPSITVDTACSSSLVSVNLGVQSIQMGECKIAICGGVNALFDPSTSVAFSKLGVLSENGRCNSFSDQASGYVRSEGAGVVVLKSLEQAKLDGDRIYGVIKGVSSNEDGASNGDKNSLTTPSCEAQSINISKAMEKASLSPSDIYYIEAHGTGTPVGDPIEVKALSKIFSNSNNNQLNNFSTDGNDNDDDDDDNTSPEPLLIGSFKSNIGHLESAAGIASLIKCCLMLKNRMLVPSINCSNLNPSIPFDQYNISVIREIRQFPTDKLVNIGINSFGFGGSNCHLIIQEYNNNFKNNSTICNNNNNNNNNIDYLIPISSKTKKSLDKYLILIKTNSNYHKDISFDDFVKFQIKSKQYNLSNRMTTIANDWNSFIKGSNEFHNLIESKDGEGGSSSSNRGIDSANQINTTTTSTINDIEPLLVFVFCGQGPQWNGMIKTLYNSENVFKNTVDHVDSILYKYFGYSILNVLSKIDDNDDSINHPIVAQPSLFLLQIGLVELFKYWGIYPSISVGHSFGEVSSYYLSGIISLETACKIVYVRSSNQNKTMGSGKMLVVSMGFKQWNDQFSAEWSDIEIACYNAPDSIVVTGNEERLKELSIKLSDESNQIFNTFLRSPCSFHSSHQEVIKGSMFEELSNLQSTGETEIPLFSTVTGRQVLSGHVTAQHIYDNVREPVLFQKTIESITSYIKSHYPSNQKVIYVEIAPHPTLFSLIKKSIPSSNKNSSSVLCPLNRKENSNNSYKKFVSQLYFNGVNVDFNFQLNSICDNVNNDHHLNNVKQNSFKETTNSLPRYQWEQDEYWSEPLISRKNRLEGPTTSLLGHRIIYSFPVFQSVLDLQSDNYKYLLDHLVNGKPVFPGAGYLDIIIEFFDYQKQQLNSSDSSNSYIINVDKIQFLNPIHLTENKLQTLQSSFEPIVTKKSAFSVNFFIKDTVEDQSKVKSMSDETWTNTCKATISLEQQQPSPSSTLTLSKKQDLQILRNRCDISKLDKFELYDKISKNLGLQYNSLFQVVDTIETGKDCSFATLSLPEDTLFTTILNPCLLDNCFHGLLTLINEKGSFVVESISSVSIYLENIGSFNQTSVGNVQFYLYTTISKATSFSSEGTCKLFTKDGSLILSIGKFIIKSTNPKSTKTNETIESPLDETFSIEWQSKDSPIPTPQQIQQQSPLNSNPSFIRSTILKDIQFEQYCSSIIHKELINHEKYKNQQSFDINSLENHLNDDQLMESLSISKEYLRFFTRIISIIKQYPKILNEKELKELKEIIELKYPSEVQLLEFEVIEKVSMIIPKLLFENDKQSSMTLFQDNLLTRFYSNSNSTRFYLERVSEMVLESIRPIVREKRVFRILEIGAGTGSLSNVVLTKLNTYLSTLNSNGGSGYNIIIEYTFTDISANFIIGEIQETMCNLYPNVTFKFSVLDLEKEIINSSDFLMGDYDIVLMAYVIHAVSNIKFSIEQLYKLLSPRGWLLCIEPKSNVVFSDLVFGCFNQWWNYYDDIRTTHCSLSESQWNQLLLNQSLNNESSSSSNCYGGFSNVSFIGGEKDVDSHSFILHCQKESISQMKLATTINNGLSSGSIVIVLNSQQLTNMKSYPKVIEYIQEATSLCKTIEIIDSKDVLNSTNSVLEKIQKSLLVFCLLGYDLLENNYQEQSFEYVKLLNLISTTASSSNDKKPPKVLLITKQSERISRSFYSRSLIGISRTSMNEYPNLSITSIDLDTNDYSLQSLLKPIFSNSKFSDNEFIFKKGLMFVSRIFKNKQLLESSNAFETDSSNLYCKASSDLSYKYAIKQSMLTENQIEIKVECVGINFKDNLFYKGLLPQEIFRMGDIYNPPYGLECSGVITRIGSNVTEYSVGQNVFGFARHSLGSHVVTNKDLVILKPDTISFSEAASIPVVYCTAWYSLFNIGQLSNEESILIHSATGGVGLASLNLLKMKNQQQQPLTNVYATVGSNEKKKFLIDNFNNLFKEDGENIFSTRDKEYSNQLESKIDVILNTLSGEFVESNFKSLRSFGRLIDLSATHVYANQQIGLGNFKFDHLYSAVDLERLIDEKPKLLQSILQRITNSIVNGSLEKIPITIFPSTETKDAIELLSKRSHIGKVVVDCTDISKCNPVGDVITNFSMRLPKPNYQLNLNSTLLITGQSGLSIPLLNWLLSKSGGNVKNVVIISKSTMKWKLQTMISHFVSGFGIHFNYVQVDISNYDALSEAIKQLPSDLPPITSVFHLAAIYNDVPMDQVTMSTVESVHNPKVLGAVNLHRISVSFGWKLNHFVLFSSITAITGYPDQSIYNSANSILDALSNFRRFMGLPSFSINLGPMKDEGKVSTNKSIKKLFKSRGLPSLSLNKLFGLLEVVINNPSNHVIPSQLICSPIDFKTYIESFSTMRPKLLHLQPTISKQQSSIINDSTKASSNISLQDKITSKVSDLLSIPISKINFDHPLKHYGLDSLLTVQFKSWIDKEFEKNLFTHIQLATISINSFLEKVNGLSTNNNNNNNSNVKSSPSIVKEEIVTLDKDQQPLLLKEHQHIIISPDIRINKPKRESLIRTPILNKFNQITESIITPSTPSLSQSDVLKTPPIKSLNNTKNSSLINTPPIQSVQQHQKQQQKVQVIQQQQQPLSRLSYKSNNNSFVLGIGISVPGEPISQQSLKDSISNDFSDKAETNEKVKRIFEQSQIKTRHLVRDYTKPENSIKFRHLETITDVNNQFKKVVPDLAQQACLRALKDWGGDKGDITHIVSVTSTGIIIPDVNFKLIDLLGLNKDVERVSLNLMGCLAGLSSLRTAASLAKASPRNRILVVCTEVCSLHFSNTDGGDQMVASSIFADGSAAYIIGCNPRIEETPLYEVMCSINRSFPNTENAMVWDLEKEGWNLGLDASIPIVIGSGIEAFVDTLLDKAKLQTSTAISAKDCEFLIHTGGKSILMNIENSLGIDPKQTKNTWDVYHAYGNMSSASVIFVMDHARKSKSLPTYSISLAFGPGLAFEGCFLKNVV

SEQ ID NO: 466 - protein, 3147 aa, Dictyostelium discoideum; identical to SEQ ID NO: 16

SEQ ID NO: 467 - protein, 3076 aa, Dictyostelium fasciculatum
MTNNNNNKVAIVGLGFRLPGGSKTPTELWSQLLQGFDGVSVVTKDRWSSTYNDTDMINNKYGGFLNMNEWKCFDSLFFGISPKEAPLIDPQQRILLTLVWEALEDAGISPTILRGTDTGVFMGVSNHDYMKLQYKDVSEQSPYAMTGSNASIISNRISYCYDFRGPSLTVDTACSSSLASVSLGLQSIANGDCKVAICGGVNALLDPSTSVAFSSLGVLNPDGRCKTFDADANGYVRGEGAGIVILKSLEQAEKDKNRIYGVILGSNMNEDGSFDKSSLTTPSGESQSKNIASALEKSELAANDIYYVECHGTGTPVGDPIEVGALSNVFTSNHSQDFPLKVGSFKTNIGHLESAAGIASLIKSSLMLKNRMLVPSIHFNQPNPKIPFDQYHIQVVNEIEVFPEDQIVNIGINSFGFGGANCHLVVQEYINQEPDYSLAEKEKYYMVPTSSNSEWSLDKYEQEVKDNTNYHHMINFQEFALHQSTMKANLLHRKVVIAKDWKEYLEGTNPAISNVLSSSDNVPGEDIPVCFVFVGQGPQWNGMGRKLYEAEPVFKDTIDICDDLLKKYCGYSVWEKIGSIAEDDQITINTPIIAQPALFLIQMGLVALYGKFGIQPSMVIGHSFGEVTSAYFSGAISLESAIKIVYYRSMLQNKTIGSGKMLAISLGSQSFDEKYGNEFHDLEIACYNAPESIVVTGKEDRLKELASQLTKEGIFNAFLKSPCSFHSSYQKAIKKEVLESLADLPSTFRPMVPLFSTVYGDLQTTPVDAQYIYKNLREPVHFEKAISNLSKYTKSNQHKRLVYLEITPHPTLAYLINKCGNAGLRTNVMSALHRSKDELLTFYSSVAQLYCQGVNIDFGTQFDESILSTNLWKEVTNILPRYQWESDTQYWNESLYSHDLRLKGPTIDLIGWKKHLNGQESFETIIDVKKNCYAYLKDHKVRGKPIFPGAGYLDIILEAVEYLEKHSNDQLTAAHTSILIQSIEFLSPFFLVEGEQQHLQTTIDRISKNVYQFQFYQKDSINQKKWSKMCKAKIQLNPQSSSQILNDTILQSLTSVPKVDLLQLKADCDVCSIDRSELYHRIVRLGLGYGKHFQVIDKLWVGPNFESLCLLSFDGNEVIENHRNNYKRVLNAMVLDNCFHGVLGILEDSNQHFVVERVDKMQVYPQTLFNQTDEIDQLYLYTRILNPTDHSTQVHATCQLIGQDGQVIVEVGRFTLKSLEKYKVNTIKKPSDQVYTINWQSKESSLPIPTSIMADPMTELHDKSQVLVDTDFVNYCCLLLKETLETISGWDWTKKNAQTMEQYMKSVGIDTSFTRFLTRLFEIHSLVPSAADYQSMSPIDLKSKVLAKYPDANLELTLIERATSIIPRLLQGDSTACHSLFENNLLSSFYTSSTAVDYYLEQVGSTIQKAIGNIVTKSDQDCKKVIKILEVGGGTGSLTTKLLTKLASLFEGTTYEKSGVEVVYTFTDISASFINSDIQSKFQKVIEKSNGCIKMVYKTLNLELDYASQSFLPSDYDCIVMSYVLHAVADLEKGIRQLYDMLAPNGWLMFIEPSPKMTFSDIVFGCFHQWWQFSDQFRTEHCAIRPNEWSELLCNQIGGFRYPVSFINFEEKEIGQDHSFVVHAQKQSISEFRVSRDSVAYCSMIVPGSATLANGLTNNGVNSPTIEGRKSLISKYLRDSLVLCQEKVDVIETELLRNPSLQDEKTIEASLSKSSIAFFMTGVETLNGNYQLVTYQLTKLFQLAGAMAERGVHVPKIVVLTKCAQRTSKNYLNASLIGLTRTAMNEYADTALQIYSIDIEEEDTADLAFIIKLVSMEMADKEYIVKKDGAVLVPRLFQNRQLIEPVDAKKSQVAYETNVDKLYCKSKQSLDYQFCTLPEVLAPNDIEIKVQAVGVNFKDNLFYKGLLPAEIFRKGDIYNPPFGLECSGTITRIGSAVSQWKIGDQVLGFARHSLASHVTTSQHLVVQKPESISYSEAASLPVVYCTAYHSLFKVNHMDEDETALIHSATGGVGLACLNLLKMKGAADGSIYATVGSKDKKNYLVQQYGSMIKHIYSTRDKEYAAELRGKIDCLVNTLSGEYTQSNFESMSSFGRIADLSVTHIYANEPLDMGNFKGDIQYCGVDLERLIDEKPKQLQKMLETIVGWVAEGKLNKLPIQVYAAERSKEAIESLGERGHIGKIIIDCSDILHHEQKNEKVEVAKSNYLVDLKDTIIITGQTGISLQIIAWFIKHSKVSHIIVISKSSLKWKLEKLMKEPHKRLVNIVFASCDVSVMENLTQTVKNKLANAPPVRAVFHLAAVYDDVPISKVTAENISNVHNPKVLGAINLHRLSIINCWKLSHFILFSSITGVIGYYDQAAYNSANAVLDSLANFRRQAGLPALAINWGPLDASGKVAENEAIQSLFASRGLPVLSIGKFFGALEAALNQSNVLNTSGALNLYQLVITPMVTSLFFDSYEHMRPKMEHLIYAGSERNARSSSSSNGGIGGASQKESFTSESVLEKLTNKVSDLLSINKSKLNLDTKLKDYGLDSLLTVQFKGWIDKEFENKNLFSHIQLSSSSINDLVEKVVQAKGIPSTGVSAKAAAVTKKPVLAKTTTPASLPNPNMVVGSTTPVAEEPVKVKSSPMVQKPMQQPKQHHLIGSPKISANVSRNHSLPSSVASPLPPLSAASAAAAAAASTNSSSSPMKHPAAIVNRRLSSIMSPSLMQTAPTSNNNPYILGIGTAVPNEPLKQSELSAVMSKDFSSDPLVVDKVSKIFEQSQINTRYLYRNPLREETALRHRKNENINDVNRQFQKCAPDLSQRACEKAIKEWGGSIQDITHIVSVSSTGVVVPDINFVLIQRLGLNKDIERLSVNFMGCLAGLSSMRAAVPLASKHPKNRVLVVCTEICSTHFSTKEGVDQIVASTIFADGSAAYILGCNPTIYEHPLFEVIGSMTRSVPDTAHTMTWDISTDGWDLGLDQSIPHHIGGGIESFVNDLLAKNKSQTQDLTPKECEFLIHTGGKAILMSIEQSLGITSKQNQHSWDIYRNYGNMSSASVIFVLEHARHSKSLPQYSISLAFGPGLAFEGCVLKNMV

SEQ ID NO: 468 - protein, 3076 aa, Dictyostelium fasciculatum
MTNNNNNKVAIVGLGFRLPGGSKTPTELWSQLLQGFDGVSVVTKDRWSSTYNDTDMINNKYGGFLNMNEWKCFDSLFFGISPKEAPLIDPQQRILLTLVWEALEDAGISPTILRGTDTGVFMGVSNHDYMKLQYKDVSEQSPYAMTGSNASIISNRISYCYDFRGPSLTVDTACSSSLASVSLGLQSIANGDCKVAICGGVNALLDPSTSVAFSSLGVLNPDGRCKTFDADANGYVRGEGAGIVILKSLEQAEKDKNRIYGVILGSNMNEDGSFDKSSLTTPSGESQSKNIASALEKSELAANDIYYVECHGTGTPVGDPIEVGALSNVFTSNHSQDFPLKVGSFKTNIGHLESAAGIASLIKSSLMLKNRMLVPSIHFNQPNPKIPFDQYHIQVVNEIEVFPEDQIVNIGINSFGFGGANCHLVVQEYINQEPDYSLAEKEKYYMVPTSSNSEWSLDKYEQEVKDNTNYHHMINFQEFALHQSTMKANLLHRKVVIAKDWKEYLEGTNPAISNVLSSSDNVPGEDIPVCFVFVGQGPQWNGMGRKLYEAEPVFKDTIDICDDLLKKYCGYSVWEKIGSIAEDDQITINTPIIAQPALFLIQMGLVALYGKFGIQPSMVIGHSFGEVTSAYFSGAISLESAIKIVYYRSMLQNKTIGSGKMLAISLGSQSFDEKYGNEFHDLEIACYNAPESIVVTGKEDRLKELASQLTKEGIFNAFLKSPCSFHSSYQKAIKKEVLESLADLPSTFRPMVPLFSTVYGDLQTTPVDAQYIYKNLREPVHFEKAISNLSKYTKSNQHKRLVYLEITPHPTLAYLINKCGNAGLRTNVMSALHRSKDELLTFYSSVAQLYCQGVNIDFGTQFDESILSTNLWKEVTNILPRYQWESDTQYWNESLYSHDLRLKGPTIDLIGWKKHLNGQESFETIIDVKKNCYAYLKDHKVRGKPIFPGAGYLDIILEAVEYLEKHSNDQLTAAHTSILIQSIEFLSPFFLVEGEQQHLQTTIDRISKNVYQFQFYQKDSINQKKWSKMCKAKIQLNPQSSSQILNDTILQSLTSVPKVDLLQLKADCDVCSIDRSELYHRIVRLGLGYGKHFQVIDKLWVGPNFESLCLLSFDGNEVIENHRNNYKRVLNAMVLDNCFHGVLGILEDSNQHFVVERVDKMQVYPQTLFNQTDEIDQLYLYTRILNPTDHSTQVHATCQLIGQDGQVIVEVGRFTLKSLEKYKVNTIKKPSDQVYTINWQSKESSLPIPTSIMADPMTELHDKSQVLVDTDFVNYCCLLLKETLETISGWDWTKKNAQTMEQYMKSVGIDTSFTRFLTRLFEIHSLVPSAADYQSMSPIDLKSKVLAKYPDANLELTLIERATSIIPRLLQGDSTACHSLFENNLLSSFYTSSTAVDYYLEQVGSTIQKAIGNIVTKSDQDCKKVIKILEVGGRTGSLTTKLLTKLASLFEGTTYEKSGVEVVYTFTDISASFINSDIQSKFQKVIEKSNGCIKMVYKTLNLELDYASQSFLPSDYDCIVMSYVLHAVADLEKGIRQLYDMLAPNGWLMFIEPSPKMTFSDIVFGCFHQWWQFSDQFRTEHCAIRPNEWSELLCNQIGGFRYPVSFINFEEKEIGQDHSFVVHAQKQSISEFRVSRDSVAYCSMIVPGSATLANGLTNNGVNSPTIEGRKSLISKYLRDSLVLCQEKVDVIETELLRNPSLQDEKTIEASLSKSSIAFFMTGVETLNGNYQLVTYQLTKLFQLAGAMAERGVHVPKIVVLTKCAQRTSKNYLNASLIGLTRTAMNEYADTALQIYSIDIEEEDTADLAFIIKLVSMEMADKEYIVKKDGAVLVPRLFQNRQLIEPVDAKKSQVAYETNVDKLYCKSKQSLDYQFCTLPEVLAPNDIEIKVQAVGVNFKDNLFYKGLLPAEIFRKGDIYNPPFGLECSGTITRIGSAVSQWKIGDQVLGFARHSLASHVTTSQHLVVQKPESISYSEAASLPVVYCTAYHSLFKVNHMDEDETALIHSATGGVGLACLNLLKMKGAADGSIYATVGSKDKKNYLVQQYGSMIKHIYSTRDKEYAAELRGKIDCLVNTLSGEYTQSNFESMSSFGRIADLSVTHIYANEPLDMGNFKGDIQYCGVDLERLIDEKPKQLQKMLETIVGWVAEGKLNKLPIQVYAAERSKEAIESLGERGHIGKIIIDCSDILHHEQKNEKVEVAKSNYLVDLKDTIIITGQTGISLQIIAWFIKHSKVSHIIVISKSSLKWKLEKLMKEPHKRLVNIVFASCDVSVMENLTQTVKNKLANAPPVRAVFHLAAVYDDVPISKVTAENISNVHNPKVLGAINLHRLSIINCWKLSHFILFSSITGVIGYYDQAAYNSANAVLDSLANFRRQAGLPALAINWGPLDASGKVAENEAIQSLFASRGLPVLSIGKFFGALEAALNQSNVLNTSGALNLYQLVITPMVTSLFFDSYEHMRPKMEHLIYAGSERNARSSSSSNGGIGGASQKESFTSESVLEKLTNKVSDLLSINKSKLNLDTKLKDYGLDSLLTVQFKGWIDKEFENKNLFSHIQLSSSSINDLVEKVVQAKGIPSTGVSAKAAAVTKKPVLAKTTTPASLPNPNMVVGSTTPVAEEPVKVKSSPMVQKPMQQPKQHHLIGSPKISANVSRNHSLPSSVASPLPPLSAASAAAAAAASTNSSSSPMKHPAAIVNRRLSSIMSPSLMQTAPTSNNNPYILGIGTAVPNEPLKQSELSAVMSKDFSSDPLVVDKVSKIFEQSQINTRYLYRNPLREETALRHRKNENINDVNRQFQKCAPDLSQRACEKAIKEWGGSIQDITHIVSVSSTGVVVPDINFVLIQRLGLNKDIERLSVNFMGCLAGLSSMRAAVPLASKHPKNRVLVVCTEICSTHFSTKEGVDQIVASTIFADGSAAYILGCNPTIYEHPLFEVIGSMTRSVPDTAHTMTWDISTDGWDLGLDQSIPHHIGGGIESFVNDLLAKNKSQTQDLTPKECEFLIHTGGKAILMSIEQSLGITSKQNQHSWDIYRNYGNMSSASVIFVLEHARHSKSLPQYSISLAFGPGLAFEGCVLKNMV

SEQ ID NO: 469 - protein, 3003 aa, Dictyostelium purpureum
MHNNINNSLPKDIAVIGIGLRLPGNSNNPESLWNNLLESFDAITQVPKDRWASSYKDMNLINNKYGGFLQDSQWKNFDPLFFGISPAEAPFIDPQQRLLLSIVWESLEDAHIKPESLRGSNTGVFVGVSNIDYSKMVFQDNYKIAPYTITGTNTSLNSNRISYCYDFRGPSMTVDTACSSSLISVGLGVQAIQSGECDLAVCGGVNALFDPTTSIAFSKLGVLNENGRCNTFSDQANGYVRSEGAGVVLLKSLSQAEKDGDRIYGVIKGVSTNEDGSLNKNSLTTPSTESQSNNINNAMKKSTLSPNDIYYIEAHGTGTKVGDPIEVQSISNVFSKDRNQVEDIEPLFIGSFKSNIGHLESAAGIASLIKVCLMLKNRILVPSINCSKLNPAIPFDNYKIKVVREVQMFPNNKTINIGINSFGFGGSNCHLIIQEYNKPTDIKCNTLIRDSDNNNKNYLIPFSMNSKISLEKYINLIKNNNYHEYIFFKDFVKYQILSKQYTLSNRMTIIANDWQSLIKSSNETYSHQEFRNQTVAITDGSITDLVSSNEPILVYVFCGQGPQWNGMMKTLYRTEPVFKNSVDYIDQVLSKYFGYSIFQKFSSISDNDDSINHPVIAQPSLFLLQIGLVELFKYWGIFPSISIGHSFGEVSSYYLSGLISLETVCRIVYVRSFYQNQTMGTGKMLVCSISNEQWLSEYSTLFSDLEIACINSSDSIVVTGNELRLKEFANILNESQIFNTFLRSPCSFHSSKQEIIKDSIFSELVNVESKESTEIPLFSTVTGELVNEPLSATTIYENVRKPVLFKNSIESLIKFYHQQQPSQQRQLIFIEIAPHPTLGSLIKKTIQESVVPFKTQPLIIAPLNRKENQDISIKKLISQLYFNGINIDFKFQLDQDENQDSSFKETTNSLPRYQWDDSEEYWAEPSQSKKNRLEGPSSTLLGYKIIYSFPVYQTVLDLQNSNFSYLLDHIVAGKPVFPGAGYIDIINQFFVQTSDIPLSNEIISIESIQFLQPLMLNQHKLTTLQSLFEPTKKSSFSVSFFSKDEKDDQIWVNTCKAKVTLEPMELSQNRVEDLELLKSQCNITQLDKKDLYDKISKDLGLFYNDAFQIVQSIHTGVNCSFATLQMPESNVTHSSILNSCFLDNCFHGLLTLINEKGSYVVESVNSIAIFLENISVDSVNSPFYLETKIIKSSPFSTEGTCRLFNKQGKLILSIGKFTIKSTNLKPKVINQLETPLNETFSIEWQSKDSPIPPAKESPIKLDSLELFNKSTILKDQDFEIYCSCLIFNQLVQYNPLFKVLATNFIQDQQDDANEENYCLSIMKELGISIDYQRFFFRILKIVKLNFSNLLSNQKEIDQLKDSIKSKFYGNSNSEDLEFQCIEKVSNIIPKLLFENDKQSSMTLFENSLLTKFYGQSISTRFYLEYVASLVLESIKPIVREKRVFKILEIGAGTGSLSNIVLEKLNKFLSINSDKNIIVEYNFTDISSSFIIGLQETMVTKYPNISFKFSVLDLEKDIKDQDFFYSDYDIVLMAYVIHAVSNITFAVKQIYNLLSPRGWLLCIEPKANIVFSDLVFGCFGQWWNYQDSIRTSHCSLESEQWKQVLSENGFPMNSFIGSLESNSHSFIIHSQKESITQIKSSSKLSIEKISFVVNENQKLMEPLLNDANTISMNPVEIIKLNQLDVEKLSISSVVFFMVGLELMETYKEELYQFIQLLNQLSLSNFNGKVVLVTKQSFLTSRNYFSRSLVAIARSAMNEYSNLDIVSIDLDSNDYNLNSLLVPIQSRFSDNEFIYKKGILFVSRFFKNNSKLLLSSQSFETNDNNMYQTTLSDLSIIRKAKDELSNNEIEIKVKSVGINFKDNLFYKGLLPQEIFRKGDINNPPFGLECSGIISRIGNGVTEFKVGDQVFGFARHSLGSHVITNKDLVIKKPESITWDQAASIPVVYCTAYYSLFNIAHLNDNNESVLIHSATGGVGLASLNLLKMKKFENVYATVGSEEKKQYLESNYSFIKSIFSTRTKEYSGQLENKVDVILNTLSGDFIESNFKSLKSFGRLIDISVTHIYANQQIGLGNFKSDHLYTAVDLERLIDEKPLLLKSILSKVTNEIDNGNLELIKINQFNSSEVKTAVESLSNRSHIGKIVVSNCENMVSSSESRIQKKKYDLKLDSTILITGQSGLSIPLIEWLLTHSIDSVSNVVIISKSPMKWKLQNLVFKFKNVKFNYIQADISNYDEIYASLKSLPDLPPIKSVFHLAACYNDVPMNQVTMDTIESVHNPKVCGSINLHRLSISLGWNLSHFILFSSITGITGYPDQSVYNSANIILDALSNHRRVMGLPSFAINLGPMKGEGKVSDVKAIKKLFKSRGLPSLSLNKLFGLLEVVINNPLKAAIPSQFICSPIDFNNYLDTFKNMNTKLSHLSSDSISKDKEKERELLSDSVSIKDKVLEKVSELLSIPISKINMDTSLKMYGLDSLLSVQFKSWVDNQFEKGLINHLELSSITVNSFIEKVNTKFGGSSVQKQPITIVKVIETPTATQTTVPAIELPQKPVNIKTLSCPLSIKTPILLPSNELSVPLFKSTASSPELSMTTPPIVNIRNLNNSILDTPPLESRKNHVRLITSNIHAPSQLQTIHQPKQQLAFKTNNNAFILGLGNSVPGEPISQEKLKESISNDFSNDPKTNEKVKRIFEQSHIKTRYLVRDYTKEENSIKYRSKESITDVNEAFKDCVPDLAEKACTKAIADWGGNKEDITHIMSVSSTGVIIPDVNFKLIDKLQLNQDIERVSLNMMGCLAGLSSLRTASSLAKASPRNRVLVVCTEICSLHFNNTGGGDQMVASSIFADGAAAYIVGCSPKINETPFFEVIQSINRATPNTENAMVWDLQKEGWNLGLASSIPHVIGEGIEKFVNDLLYKAKSQVSSLSPKECEFLIHTGGKSILMNIENALGIDPKMNKHTWDIYHAYGNMSSASVIFVLDHARKSKNLPTYSISLAFGPGLAFEGCLLRNLV

SEQ ID NO: 470 - protein, 3003 aa, Dictyostelium purpureum
MHNNINNSLPKDIAVIGIGLRLPGNSNNPESLWNNLLESFDAITQVPKDRWASSYKDMNLINNKYGGFLQDSQWKNFDPLFFGISPAEAPFIDPQQRLLLSIVWESLEDAHIKPESLRGSNTGVFVGVSNIDYSKMVFQDNYKIAPYTITGTNTSLNSNRISYCYDFRGPSMTVDTACSSSLISVGLGVQAIQSGECDLAVCGGVNALFDPTTSIAFSKLGVLNENGRCNTFSDQANGYVRSEGAGVVLLKSLSQAEKDGDRIYGVIKGVSTNEDGSLNKNSLTTPSTESQSNNINNAMKKSTLSPNDIYYIEAHGTGTKVGDPIEVQSISNVFSKDRNQVEDIEPLFIGSFKSNIGHLESAAGIASLIKVCLMLKNRILVPSINCSKLNPAIPFDNYKIKVVREVQMFPNNKTINIGINSFGFGGSNCHLIIQEYNKPTDIKCNTLIRDSDNNNKNYLIPFSMNSKISLEKYINLIKNNNYHEYIFFKDFVKYQILSKQYTLSNRMTIIANDWQSLIKSSNETYSHQEFRNQTVAITDGSITDLVSSNEPILVYVFCGQGPQWNGMMKTLYRTEPVFKNSVDYIDQVLSKYFGYSIFQKFSSISDNDDSINHPVIAQPSLFLLQIGLVELFKYWGIFPSISIGHSFGEVSSYYLSGLISLETVCRIVYVRSFYQNQTMGTGKMLVCSISNEQWLSEYSTLFSDLEIACINSSDSIVVTGNELRLKEFANILNESQIFNTFLRSPCSFHSSKQEIIKDSIFSELVNVESKESTEIPLFSTVTGELVNEPLSATTIYENVRKPVLFKNSIESLIKFYHQQQPSQQRQLIFIEIAPHPTLGSLIKKTIQESVVPFKTQPLIIAPLNRKENQDISIKKLISQLYFNGINIDFKFQLDQDENQDSSFKETTNSLPRYQWDDSEEYWAEPSQSKKNRLEGPSSTLLGYKIIYSFPVYQTVLDLQNSNFSYLLDHIVAGKPVFPGAGYIDIINQFFVQTSDIPLSNEIISIESIQFLQPLMLNQHKLTTLQSLFEPTKKSSFSVSFFSKDEKDDQIWVNTCKAKVTLEPMELSQNRVEDLELLKSQCNITQLDKKDLYDKISKDLGLFYNDAFQIVQSIHTGVNCSFATLQMPESNVTHSSILNSCFLDNCFHGLLTLINEKGSYVVESVNSIAIFLENISVDSVNSPFYLETKIIKSSPFSTEGTCRLFNKQGKLILSIGKFTIKSTNLKPKVINQLETPLNETFSIEWQSKDSPIPPAKESPIKLDSLELFNKSTILKDQDFEIYCSCLIFNQLVQYNPLFKVLATNFIQDQQDDANEENYCLSIMKELGISIDYQRFFFRILKIVKLNFSNLLSNQKEIDQLKDSIKSKFYGNSNSEDLEFQCIEKVSNIIPKLLFENDKQSSMTLFENSLLTKFYGQSISTRFYLEYVASLVLESIKPIVREKRVFKILEIGARTGSLSNIVLEKLNKFLSINSDKNIIVEYNFTDISSSFIIGLQETMVTKYPNISFKFSVLDLEKDIKDQDFFYSDYDIVLMAYVIHAVSNITFAVKQIYNLLSPRGWLLCIEPKANIVFSDLVFGCFGQWWNYQDSIRTSHCSLESEQWKQVLSENGFPMNSFIGSLESNSHSFIIHSQKESITQIKSSSKLSIEKISFVVNENQKLMEPLLNDANTISMNPVEIIKLNQLDVEKLSISSVVFFMVGLELMETYKEELYQFIQLLNQLSLSNFNGKVVLVTKQSFLTSRNYFSRSLVAIARSAMNEYSNLDIVSIDLDSNDYNLNSLLVPIQSRFSDNEFIYKKGILFVSRFFKNNSKLLLSSQSFETNDNNMYQTTLSDLSIIRKAKDELSNNEIEIKVKSVGINFKDNLFYKGLLPQEIFRKGDINNPPFGLECSGIISRIGNGVTEFKVGDQVFGFARHSLGSHVITNKDLVIKKPESITWDQAASIPVVYCTAYYSLFNIAHLNDNNESVLIHSATGGVGLASLNLLKMKKFENVYATVGSEEKKQYLESNYSFIKSIFSTRTKEYSGQLENKVDVILNTLSGDFIESNFKSLKSFGRLIDISVTHIYANQQIGLGNFKSDHLYTAVDLERLIDEKPLLLKSILSKVTNEIDNGNLELIKINQFNSSEVKTAVESLSNRSHIGKIVVSNCENMVSSSESRIQKKKYDLKLDSTILITGQSGLSIPLIEWLLTHSIDSVSNVVIISKSPMKWKLQNLVFKFKNVKFNYIQADISNYDEIYASLKSLPDLPPIKSVFHLAACYNDVPMNQVTMDTIESVHNPKVCGSINLHRLSISLGWNLSHFILFSSITGITGYPDQSVYNSANIILDALSNHRRVMGLPSFAINLGPMKGEGKVSDVKAIKKLFKSRGLPSLSLNKLFGLLEVVINNPLKAAIPSQFICSPIDFNNYLDTFKNMNTKLSHLSSDSISKDKEKERELLSDSVSIKDKVLEKVSELLSIPISKINMDTSLKMYGLDSLLSVQFKSWVDNQFEKGLINHLELSSITVNSFIEKVNTKFGGSSVQKQPITIVKVIETPTATQTTVPAIELPQKPVNIKTLSCPLSIKTPILLPSNELSVPLFKSTASSPELSMTTPPIVNIRNLNNSILDTPPLESRKNHVRLITSNIHAPSQLQTIHQPKQQLAFKTNNNAFILGLGNSVPGEPISQEKLKESISNDFSNDPKTNEKVKRIFEQSHIKTRYLVRDYTKEENSIKYRSKESITDVNEAFKDCVPDLAEKACTKAIADWGGNKEDITHIMSVSSTGVIIPDVNFKLIDKLQLNQDIERVSLNMMGCLAGLSSLRTASSLAKASPRNRVLVVCTEICSLHFNNTGGGDQMVASSIFADGAAAYIVGCSPKINETPFFEVIQSINRATPNTENAMVWDLQKEGWNLGLASSIPHVIGEGIEKFVNDLLYKAKSQVSSLSPKECEFLIHTGGKSILMNIENALGIDPKMNKHTWDIYHAYGNMSSASVIFVLDHARKSKNLPTYSISLAFGPGLAFEGCLLRNLV

SEQ ID NO: 471 - protein, 3026 aa, Polysphondylium pallidum
MSFSENSPDSFLDLSTIIQEQQQQQENSVGLTGDVAIVGIGLRMPGGSKTPNEFWVQLLQSFDGVSLVSKERWAASFYENHIINNNYGGFLNMNEWKKFDPLFFGISPKEAPLIDPQQRMMLTLAWEALEDAQIPPFSLRGSKIGVFMGVSNYDYMKLQFKGAPSAELPPYTMTGTNGSIISNRISYCFDFRGPSITIDTACSSSLVSVNLGCQSILSGESEVALCGGVNALLDPSTSAAFSSLGVLNPDGHCRAFDADAKGYVRGEGAGIVVLKSLAAAERDGNRIYGVIRGGSTNEDGKFNKSSLTTPSISSQAENIRTTLNKAALNPSDIFYVEAHGTGTPVGDPIEVQALHEVFSANHSVGYPLKIGSVKSNIGHLESAAGIASLIKVCMMLKNRLLVPTINFNKPNPAIPFEDWNIDVVKQIEDFPEHSVRIGINSFGFGGSNCHLIIEEYQSISTDIENKQNDGFRYLVPLSANSQHSLNKYTEDIISNGDIHRNVDFKEFVMHQSLNKSHLSHRKVYFAKDWKEFIEQGVSVSSQLSASSTDNNDSSIDSVNSSKVVFVFCGQGPQWKGMGSELYQAESIYKETVDHIDSLFKPLFGYSILEKLISLPDDSLEIHHPIIAQPALFLLQCGLVSLYRQWGVEPSFVVGHSFGEVTSAYCSGALTLEEAVKIVYHRSSLQNITIGSGKMLAVTLTSDTFNADYHSKYPELEIACYNSLDSLVITGVEDKLQEFSNDLTALGIFNVFLKSPCSFHSSHQKVLKSRVFESLTDLPSVLHNKIPLFSTVTGSLQTDPVDARYIYRNLRHPVQFKGAIESIYDIASEPSDNLIFLEITPHPTLSYLINKIVPNANVIPSLYRNKDELVSFNTSIAILHCNGCNVNFTSQFSHQELSSPVWRERVNLLPRYQWDTDVYWNEPQYSIDCRLSGPSGTILGHQAIQGLQRYESIIDCNRRPFEYLKDHKVKGKALFPGAGYIDAIIQAMYPRQMDIMISSIEFQSPFFLVDGEQQYLETVFDEVTLNNNNSYKVQFFQKDGEKTQAWTKTANARLSLLQPTNDTTRVDIASLMSTCKFTTIGKTDLYQKISRLGLNYGPTFQRVESIDIGPDCSMANIPFHVKGGPHHILNACLIDNCFHGMLALLDNRQHFVVAQAENVHINLELLQHLNSQPVDNLYLYTKILHRGQFEITGSTQLLTPSGQNLLSMKRFTVKTLDKNHSDQIKFPCDNVFTMNWQTKESPLPSPFSIVPEKLPQQAAESQILMDFQFVLYCAKLVNQSLSKYLLGYNLLKFIATPIPELLTQYQIHSKFTRFLTRLQSILIDNRIDLDPNGELDADMSIQKAMILDRYPKALVEFELVERAANLIPALLTGDSSACHSLFENDLLSKFYTHSSSVTYYLEQLADTIQHAITSKLSEPRVFRILEIGGGTGSLTYRLLNTFNLILGGPKQRIEIEYTFTDVSAGFVTTMNEEIEKSAKLPHNFSMKFKTLDLERDVVAQGFLPGSYDMVLMSYVVHAVSNLPYALEQLNHITSPSGWLLFIEPSKNIIFSDIVFGCFHQWWQYSDNQRSDHCSLAPEQWSKLLHKEGFPQTITISPPNAMGQMGASHSFVVLSQKLPMNTEHLEDDIQKISLIVSKTQVHPTNPTRKLHKLLREASVSAHEVEIIESQNIETSMDRIKGSNYLFYFHGLETLSGNYKLVTQELVTLIQKLATIPVGSAPKLAIVTKNSCTLNSRNYLNASLIGIARTAANEYPTLSITMIDIDDEDTTDMKTLINLTGKSDKLADSEFIIKGGKILVPRLTPVPRDTLLESSGAYEKNINNVACLSDAKLGFHCVTRSPLGSSEIEISVKAVGLNFKDYLFMRGLLPQEIFRKGDIYNPPFGLECSGIISRIGEQVDQFSVGDEVVGFARHSLGSHVVTNQNLVVMKPSMLSYEEAASIPVVYCTAFYSLFNVAKLDTRHESVLIHGATGGVGMAALNLLKMKSALRVFATAGSTEKQELLKERFGEMLCGVYNSRTKEFADRIKETSSGVNVLLNTLSGEFMNANFESLASFGRIADLSVTHIYANEPLDMSNFKRDTSYSAVDLERLIDERPQLLQSMLSEIMDNISSGSLEIIPINVYSASKSRAAVESMSERKHIGKIVIDCKSIDKDILIPLFKSPTLVPIPNYKLDISNTVIITGQTGISLELIKWLANRSNASDIVVISRSSLGWKLETLIKRLQLNRSKPAIHHIQVDIANMDSLTSSVQKLEVPPIQAVFHLAAIYYDVPFDQVNIDVINKVHDPKVIGAINLHRLSIISGWKLDYFVLFSSITSITGYNGQASYNSSNAVLDALCNFRISAGLPSLSFNWGPLQSEGKVADNEAIEELFLNRGLPSLSLPRFFGALECALSGNESCHPPRQLIVSPINAQLYFDSFPHMRPKMAHLVVINENDNRLDNGKDDISLEERITNKVANLLSVNHSKLNPDTKLKEYGLDSLLTVQFKSWIDKEYEKNLFTHIQLSSSSIKNIIQKIANLATGTSKGTTTALLSASEDTSKAKFKVDVRTSPLPKLSYVLPRKSSVPNIELPSLLPITKEKSSLHNSTNNLPQYNKLQSSPVPSSKTNPLLRTVHAKSLINNGDRITSNTTGSNSSGRGTPLSSPTSSSPTRSLSPMLSLVMPTISNNINPYILGMGTAVPNGPLYQDDLGATMSKDFSDDPETVDKVVKIFEQSHIKTRHLFRNPLLPETSLKQRKNENISDVNGQFIKAAPSLSRESCEKAIKDWGGNVEDITHIVSVSSTGVVVPDINFLLIEKLGLNRDVERVSINFMGCLAGLSSLRAACSLACHNAKNRILVVCTEICSTHFTTNEGVDQIVASTIFADGSAAYILGCNPSIYERPLFEVLTSMNRSVPGTAHTMTWEISTNGWDLGLDQSIPHHIGGGIETFVRELLEKTKAQTHSTNFKDYEFLIHTGGKAILMSIENSLDIVSTQNSHSWSIYKAFGNMSSASVLFVMDHARKSKSLPQYSIGLAFGPGLAFEGCVLRNIC

SEQ ID NO: 472 - protein, 3026 aa, Polysphondylium pallidum
MSFSENSPDSFLDLSTIIQEQQQQQENSVGLTGDVAIVGIGLRMPGGSKTPNEFWVQLLQSFDGVSLVSKERWAASFYENHIINNNYGGFLNMNEWKKFDPLFFGISPKEAPLIDPQQRMMLTLAWEALEDAQIPPFSLRGSKIGVFMGVSNYDYMKLQFKGAPSAELPPYTMTGTNGSIISNRISYCFDFRGPSITIDTACSSSLVSVNLGCQSILSGESEVALCGGVNALLDPSTSAAFSSLGVLNPDGHCRAFDADAKGYVRGEGAGIVVLKSLAAAERDGNRIYGVIRGGSTNEDGKFNKSSLTTPSISSQAENIRTTLNKAALNPSDIFYVEAHGTGTPVGDPIEVQALHEVFSANHSVGYPLKIGSVKSNIGHLESAAGIASLIKVCMMLKNRLLVPTINFNKPNPAIPFEDWNIDVVKQIEDFPEHSVRIGINSFGFGGSNCHLIIEEYQSISTDIENKQNDGFRYLVPLSANSQHSLNKYTEDIISNGDIHRNVDFKEFVMHQSLNKSHLSHRKVYFAKDWKEFIEQGVSVSSQLSASSTDNNDSSIDSVNSSKVVFVFCGQGPQWKGMGSELYQAESIYKETVDHIDSLFKPLFGYSILEKLISLPDDSLEIHHPIIAQPALFLLQCGLVSLYRQWGVEPSFVVGHSFGEVTSAYCSGALTLEEAVKIVYHRSSLQNITIGSGKMLAVTLTSDTFNADYHSKYPELEIACYNSLDSLVITGVEDKLQEFSNDLTALGIFNVFLKSPCSFHSSHQKVLKSRVFESLTDLPSVLHNKIPLFSTVTGSLQTDPVDARYIYRNLRHPVQFKGAIESIYDIASEPSDNLIFLEITPHPTLSYLINKIVPNANVIPSLYRNKDELVSFNTSIAILHCNGCNVNFTSQFSHQELSSPVWRERVNLLPRYQWDTDVYWNEPQYSIDCRLSGPSGTILGHQAIQGLQRYESIIDCNRRPFEYLKDHKVKGKALFPGAGYIDAIIQAMYPRQMDIMISSIEFQSPFFLVDGEQQYLETVFDEVTLNNNNSYKVQFFQKDGEKTQAWTKTANARLSLLQPTNDTTRVDIASLMSTCKFTTIGKTDLYQKISRLGLNYGPTFQRVESIDIGPDCSMANIPFHVKGGPHHILNACLIDNCFHGMLALLDNRQHFVVAQAENVHINLELLQHLNSQPVDNLYLYTKILHRGQFEITGSTQLLTPSGQNLLSMKRFTVKTLDKNHSDQIKFPCDNVFTMNWQTKESPLPSPFSIVPEKLPQQAAESQILMDFQFVLYCAKLVNQSLSKYLLGYNLLKFIATPIPELLTQYQIHSKFTRFLTRLQSILIDNRIDLDPNGELDADMSIQKAMILDRYPKALVEFELVERAANLIPALLTGDSSACHSLFENDLLSKFYTHSSSVTYYLEQLADTIQHAITSKLSEPRVFRILEIGGRTGSLTYRLLNTFNLILGGPKQRIEIEYTFTDVSAGFVTTMNEEIEKSAKLPHNFSMKFKTLDLERDVVAQGFLPGSYDMVLMSYVVHAVSNLPYALEQLNHITSPSGWLLFIEPSKNIIFSDIVFGCFHQWWQYSDNQRSDHCSLAPEQWSKLLHKEGFPQTITISPPNAMGQMGASHSFVVLSQKLPMNTEHLEDDIQKISLIVSKTQVHPTNPTRKLHKLLREASVSAHEVEIIESQNIETSMDRIKGSNYLFYFHGLETLSGNYKLVTQELVTLIQKLATIPVGSAPKLAIVTKNSCTLNSRNYLNASLIGIARTAANEYPTLSITMIDIDDEDTTDMKTLINLTGKSDKLADSEFIIKGGKILVPRLTPVPRDTLLESSGAYEKNINNVACLSDAKLGFHCVTRSPLGSSEIEISVKAVGLNFKDYLFMRGLLPQEIFRKGDIYNPPFGLECSGIISRIGEQVDQFSVGDEVVGFARHSLGSHVVTNQNLVVMKPSMLSYEEAASIPVVYCTAFYSLFNVAKLDTRHESVLIHGATGGVGMAALNLLKMKSALRVFATAGSTEKQELLKERFGEMLCGVYNSRTKEFADRIKETSSGVNVLLNTLSGEFMNANFESLASFGRIADLSVTHIYANEPLDMSNFKRDTSYSAVDLERLIDERPQLLQSMLSEIMDNISSGSLEIIPINVYSASKSRAAVESMSERKHIGKIVIDCKSIDKDILIPLFKSPTLVPIPNYKLDISNTVIITGQTGISLELIKWLANRSNASDIVVISRSSLGWKLETLIKRLQLNRSKPAIHHIQVDIANMDSLTSSVQKLEVPPIQAVFHLAAIYYDVPFDQVNIDVINKVHDPKVIGAINLHRLSIISGWKLDYFVLFSSITSITGYNGQASYNSSNAVLDALCNFRISAGLPSLSFNWGPLQSEGKVADNEAIEELFLNRGLPSLSLPRFFGALECALSGNESCHPPRQLIVSPINAQLYFDSFPHMRPKMAHLVVINENDNRLDNGKDDISLEERITNKVANLLSVNHSKLNPDTKLKEYGLDSLLTVQFKSWIDKEYEKNLFTHIQLSSSSIKNIIQKIANLATGTSKGTTTALLSASEDTSKAKFKVDVRTSPLPKLSYVLPRKSSVPNIELPSLLPITKEKSSLHNSTNNLPQYNKLQSSPVPSSKTNPLLRTVHAKSLINNGDRITSNTTGSNSSGRGTPLSSPTSSSPTRSLSPMLSLVMPTISNNINPYILGMGTAVPNGPLYQDDLGATMSKDFSDDPETVDKVVKIFEQSHIKTRHLFRNPLLPETSLKQRKNENISDVNGQFIKAAPSLSRESCEKAIKDWGGNVEDITHIVSVSSTGVVVPDINFLLIEKLGLNRDVERVSINFMGCLAGLSSLRAACSLACHNAKNRILVVCTEICSTHFTTNEGVDQIVASTIFADGSAAYILGCNPSIYERPLFEVLTSMNRSVPGTAHTMTWEISTNGWDLGLDQSIPHHIGGGIETFVRELLEKTKAQTHSTNFKDYEFLIHTGGKAILMSIENSLDIVSTQNSHSWSIYKAFGNMSSASVLFVMDHARKSKSLPQYSIGLAFGPGLAFEGCVLRNIC

SEQ ID NO: 473 - DNA, 16888 bp, Artifical Sequence
  exon (3486)..(12716)
sctratcgcgcgtttcggtgatgacggtgaaaacctctgacacatgcagctcccggagacggtcacagcttgtctgtaagcggatgccgggagcagacaagcccgtcagggcgcgtcagcgggtgttggcgggtgtcggggctggcttaactatgcggcatcagagcagattgtactgagagtgcaccataccacagcttttcaattcaattcatcattttttttttattcttttttttgatttcggtttctttgaaatttttttgattcggtaatctccgaacagaaggaagaacgaaggaaggagcacagacttagattggtatatatacgcatatgtagtgttgaagaaacatgaaattgcccagtattcttaacccaactgcacagaacaaaaacctgcaggaaacgaagataaatcatgtcgaaagctacatataaggaacgtgctgctactcatcctagtcctgttgctgccaagctatttaatatcatgcacgaaaagcaaacaaacttgtgtgcttcattggatgttcgtaccaccaaggaattactggagttagttgaagcattaggtcccaaaatttgtttactaaaaacacatgtggatatcttgactgatttttccatggagggcacagttaagccgctaaaggcattatccgccaagtacaattttttactcttcgaagacagaaaatttgctgacattggtaatacagtcaaattgcagtactctgcgggtgtatacagaatagcagaatgggcagacattacgaatgcacacggtgtggtgggcccaggtattgttagcggtttgaagcaggcggcagaagaagtaacaaaggaacctagaggccttttgatgttagcagaattgtcatgcaagggctccctatctactggagaatatactaagggtactgttgacattgcgaagagcgacaaagattttgttatcggctttattgctcaaagagacatgggtggaagagatgaaggttacgattggttgattatgacacccggtgtgggtttagatgacaagggagacgcattgggtcaacagtatagaaccgtggatgatgtggtctctacaggatctgacattattattgttggaagaggactatttgcaaagggaagggatgctaaggtagagggtgaacgttacagaaaagcaggctgggaagcatatttgagaagatgcggccagcaaaactaaaaaactgtattataagtaaatgcatgtatactaaactcacaaattagagcttcaatttaattatatcagttattaccctatgcggtgtgaaataccgcacagatgcgtaaggagaaaataccgcatcaggaaattgtaaacgttaatattttgttaaaattcgcgttaaatttttgttaaatcagctcattttttaaccaataggccgaaatcggcaaaatcccttataaatcaaaagaatagaccgagatagggttgagtgttgttccagtttggaacaagagtccactattaaagaacgtggactccaacgtcaaagggcgaaaaaccgtctatcagggcgatggcccactacgtgaaccatcaccctaatcaagttttttggggtcgaggtgccgtaaagcactaaatcggaaccctaaagggagcccccgatttagagcttgacggggaaagccggcgaacgtggcgagaaaggaagggaagaaagcgaaaggagcgggcgctagggcgctggcaagtgtagcggtcacgctgcgcgtaaccaccacacccgccgcgcttaatgcgccgctacagggcgcgtccattcgccattcaggctgcgcaactgttgggaagggcgatcggtgcgggcctcttcgctattacgccagctgaattggagcgacctcatgctatacctgagaaagcaacctgacctacaggaaagagttactcaagaataagaattttcgttttaaaacctaagagtcactttaaaatttgtatacacttattttttttataacttatttaataataaaaatcataaatcataagaaattcgcttatttagaagtgtcaacaacgtatctaccaacgatttgacccttttccatcttttcgtaaatttctggcaaggtagacaagccgacaaccttgattggagacttgaccaaacctctggcgaagaattgttaattaagagctcagatcttatcgtcgtcatccttgtaatccatcgatactagtgcggccgccctttagtgagggttgaattcgaattttcaaaaattcttactttttttttggatggacgcaaagaagtttaataatcatattacatggcattaccaccatatacatatccatatacatatccatatctaatcttacttatatgttgtggaaatgtaaagagccccattatcttagcctaaaaaaaccttctctttggaactttcagtaatacgcttaactgctcattgctatattgaagtacggattagaagccgccgagcgggtgacagccctccgaaggaagactctcctccgtgcgtcctcgtcttcaccggtcgcgttcctgaaacgcagatgtgcctcgcgccgcactgctccgaacaataaagattctacaatactagcttttatggttatgaagaggaaaaattggcagtaacctggccccacaaaccttcaaatgaacgaatcaaattaacaaccataggatgataatgcgattagttttttagccttatttctggggtaattaatcagcgaagcgatgatttttgatctattaacagatatataaatgcaaaaactgcataaccactttaactaatactttcaacattttcggtttgtattacttcttattcaaatgtaataaaagtatcaacaaaaaattgttaatatacctctatactttaacgtcaaggagaaaaaaccccggatccgtaatacgactcactatagggcccgggggcgcgccaagcaacaggcgcgttggacttttaattttcgaggaccgcgaatccttacatcacacccaatcccccacaagtgatcccccacacaccatagcttcaaaatgtttctactccttttttactcttccagattttctcggactccgcgcatcgccgtaccacttcaaaacacccaagcacagcatactaaatttcccctctttcttcctctagggtgtcgttaattacccgtactaaaggtttggaaaagaaaaaagagaccgcctcgtttctttttcttcgtcgaaaaaggcaataaaaatttttatcacgtttctttttcttgaaaatttttttttttgatttttttctctttcgatgacctcccattgatatttaagttaataaacggtcttcaatttctcaagtttcagtttcatttttcttgttctattacaactttttttacttcttgctcattagaaagaaagcatagcaatctaatctaagttttaataaacaaaacaatgactaacaacaacaacaacaaggttgctattgttggtttgggtttcagattgccaggtggttctaagactccaactgaattgtggtctcaattgttgcaaggtttcgacggtgtttctgttgttactaaggacagatggtcttctacttacaacgacactgacatgattaacaacaagtacggtggtttcttgaacatgaacgaatggaagtgtttcgactctttgttcttcggtatttctccaaaggaagctccattgattgacccacaacaaagaattttgttgactttggtttgggaagctttggaagacgctggtatttctccaactattttgagaggtactgacactggtgttttcatgggtgtttctaaccacgactacatgaagttgcaatacaaggacgtttctgaacaatctccatacgctatgactggttctaacgcttctattatttctaacagaatttcttactgttacgacttcagaggtccatctttgactgttgacactgcttgttcttcttctttggcttctgtttctttgggtttgcaatctattgctaacggtgactgtaaggttgctatttgtggtggtgttaacgctttgttggacccatctacttctgttgctttctcttctttgggtgttttgaacccagacggtagatgtaagactttcgacgctgacgctaacggttacgttagaggtgaaggtgctggtattgttattttgaagtctttggaacaagctgaaaaggacaagaacagaatttacggtgttattttgggttctaacatgaacgaagacggttctttcgacaagtcttctttgactactccatctggtgaatctcaatctaagaacattgcttctgctttggaaaagtctgaattggctgctaacgacatttactacgttgaatgtcacggtactggtactccagttggtgacccaattgaagttggtgctttgtctaacgttttcacttctaaccactctcaagacttcccattgaaggttggttctttcaagactaacattggtcacttggaatctgctgctggtattgcttctttgattaagtcttctttgatgttgaagaacagaatgttggttccatctattcacttcaaccaaccaaacccaaagattccattcgaccaataccacattcaagttgttaacgaaattgaagttttcccagaagaccaaattgttaacattggtattaactctttcggtttcggtggtgctaactgtcacttggttgttcaagaatacattaaccaagaaccagactactctttggctgaaaaggaaaagtactacatggttccaacttcttctaactctgaatggtctttggacaagtacgaacaagaagttaaggacaacactaactaccaccacatgattaacttccaagaattcgctttgcaccaatctactatgaaggctaacttgttgcacagaaaggttgttattgctaaggactggaaggaatacttggaaggtactaacccagctatttctaacgttttgtcttcttctgacaacgttccaggtgaagacattccagtttgtttcgttttcgttggtcaaggtccacaatggaacggtatgggtagaaagttgtacgaagctgaaccagttttcaaggacactattgacatttgtgacgacttgttgaagaagtactgtggttactctgtttgggaaaagattggttctattgctgaagacgaccaaattactattaacactccaattattgctcaaccagctttgttcttgattcaaatgggtttggttgctttgtacggtaagttcggtattcaaccatctatggttattggtcactctttcggtgaagttacttctgcttacttctctggtgctatttctttggaatctgctattaagattgtttactacagatctatgttgcaaaacaagactattggttctggtaagatgttggctatttctttgggttctcaatctttcgacgaaaagtacggtaacgaattccacgacttggaaattgcttgttacaacgctccagaatctattgttgttactggtaaggaagacagattgaaggaattggcttctcaattgactaaggaaggtattttcaacgctttcttgaagtctccatgttctttccactcttcttaccaaaaggctattaagaaggaagttttggaatctttggctgacttgccatctactttcagaccaatggttccattgttctctactgtttacggtgacttgcaaactactccagttgacgctcaatacatttacaagaacttgagagaaccagttcacttcgaaaaggctatttctaacttgtctaagtacactaagtctaaccaacacaagagattggtttacttggaaattactccacacccaactttggcttacttgattaacaagtgtggtaacgctggtttgagaactaacgttatgtctgctttgcacagatctaaggacgaattgttgactttctactcttctgttgctcaattgtactgtcaaggtgttaacattgacttcggtactcaattcgacgaatctattttgtctactaacttgtggaaggaagttactaacattttgccaagataccaatgggaatctgacactcaatactggaacgaatctttgtactctcacgacttgagattgaagggtccaactattgacttgattggttggaagaagcacttgaacggtcaagaatctttcgaaactattattgacgttaagaagaactgttacgcttacttgaaggaccacaaggttagaggtaagccaattttcccaggtgctggttacttggacattattttggaagctgttgaatacttggaaaagcactctaacgaccaattgactgctgctcacacttctattttgattcaatctattgaattcttgtctccattcttcttggttgaaggtgaacaacaacacttgcaaactactattgacagaatttctaagaacgtttaccaattccaattctaccaaaaggactctattaaccaaaagaagtggtctaagatgtgtaaggctaagattcaattgaacccacaatcttcttctcaaattttgaacgacactattttgcaatctttgacttctgttccaaaggttgacttgttgcaattgaaggctgactgtgacgtttgttctattgacagatctgaattgtaccacagaattgttagattgggtttgggttacggtaagcacttccaagttattgacaagttgtgggttggtccaaacttcgaatctttgtgtttgttgtctttcgacggtaacgaagttattgaaaaccacagaaacaactacaagagagttttgaacgctatggttttggacaactgtttccacggtgttttgggtattttggaagactctaaccaacacttcgttgttgaaagagttgacaagatgcaagtttacccacaaactttgttcaaccaaactgacgaaattgaccaattgtacttgtacactagaattttgaacccaactgaccactctactcaagttcacgctacttgtcaattgattggtcaagacggtcaagttattgttgaagttggtagattcactttgaagtctttggaaaagtacaaggttaacactattaagaagccatctgaccaagtttacactattaactggcaatctaaggaatcttctttgccaattccaacttctattatggctgacccaatgactgaattgcacgacaagtctcaagttttggttgacactgacttcgttaactactgttgtttgttgttgaaggaaactttggaaactatttctggttgggactggactaagaagaacgctcaaactatggaacaatacatgaagtctgttggtattgacacttctttcactagattcttgactagattgttcgaaattcactctttggttccatctgctgctgactaccaatctatgtctccaattgacttgaagtctaaggttttggctaagtacccagacgctaacttggaattgactttgattgaaagagctacttctattattccaagattgttgcaaggtgactctactgcttgtcactctttgttcgaaaacaacttgttgtcttctttctacacttcttctactgctgttgactactacttggaacaagttggttctactattcaaaaggctattggtaacattgttactaagtctgaccaagactgtaagaaggttattaagattttggaagttggtggtggtactggttctttgactactaagttgttgactaagttggcttctttgttcgaaggtactacttacgaaaagtctggtgttgaagttgtttacactttcactgacatttctgcttctttcattaactctgacattcaatctaagttccaaaaggttattgaaaagtctaacggttgtattaagatggtttacaagactttgaacttggaattggactacgcttctcaatctttcttgccatctgactacgactgtattgttatgtcttacgttttgcacgctgttgctgacttggaaaagggtattagacaattgtacgacatgttggctccaaacggttggttgatgttcattgaaccatctccaaagatgactttctctgacattgttttcggttgtttccaccaatggtggcaattctctgaccaattcagaactgaacactgtgctattagaccaaacgaatggtctgaattgttgtgtaaccaaattggtggtttcagatacccagtttctttcattaacttcgaagaaaaggaaattggtcaagaccactctttcgttgttcacgctcaaaagcaatctatttctgaattcagagtttctagagactctgttgcttactgttctatgattgttccaggttctgctactttggctaacggtttgactaacaacggtgttaactctccaactattgaaggtagaaagtctttgatttctaagtacttgagagactctttggttttgtgtcaagaaaaggttgacgttattgaaactgaattgttgagaaacccatctttgcaagacgaaaagactattgaagcttctttgtctaagtcttctattgctttcttcatgactggtgttgaaactttgaacggtaactaccaattggttacttaccaattgactaagttgttccaattggctggtgctatggctgaaagaggtgttcacgttccaaagattgttgttttgactaagtgtgctcaaagaacttctaagaactacttgaacgcttctttgattggtttgactagaactgctatgaacgaatacgctgacactgctttgcaaatttactctattgacattgaagaagaagacactgctgacttggctttcattattaagttggtttctatggaaatggctgacaaggaatacattgttaagaaggacggtgctgttttggttccaagattgttccaaaacagacaattgattgaaccagttgacgctaagaagtctcaagttgcttacgaaactaacgttgacaagttgtactgtaagtctaagcaatctttggactaccaattctgtactttgccagaagttttggctccaaacgacattgaaattaaggttcaagctgttggtgttaacttcaaggacaacttgttctacaagggtttgttgccagctgaaattttcagaaagggtgacatttacaacccaccattcggtttggaatgttctggtactattactagaattggttctgctgtttctcaatggaagattggtgaccaagttttgggtttcgctagacactctttggcttctcacgttactacttctcaacacttggttgttcaaaagccagaatctatttcttactctgaagctgcttctttgccagttgtttactgtactgcttaccactctttgttcaaggttaaccacatggacgaagacgaaactgctttgattcactctgctactggtggtgttggtttggcttgtttgaacttgttgaagatgaagggtgctgctgacggttctatttacgctactgttggttctaaggacaagaagaactacttggttcaacaatacggttctatgattaagcacatttactctactagagacaaggaatacgctgctgaattgagaggtaagattgactgtttggttaacactttgtctggtgaatacactcaatctaacttcgaatctatgtcttctttcggtagaattgctgacttgtctgttactcacatttacgctaacgaaccattggacatgggtaacttcaagggtgacattcaatactgtggtgttgacttggaaagattgattgacgaaaagccaaagcaattgcaaaagatgttggaaactattgttggttgggttgctgaaggtaagttgaacaagttgccaattcaagtttacgctgctgaaagatctaaggaagctattgaatctttgggtgaaagaggtcacattggtaagattattattgactgttctgacattttgcaccacgaacaaaagaacgaaaaggttgaagttgctaagtctaactacttggttgacttgaaggacactattattattactggtcaaactggtatttctttgcaaattattgcttggttcattaagcactctaaggtttctcacattattgttatttctaagtcttctttgaagtggaagttggaaaagttgatgaaggaaccacacaagagattggttaacattgttttcgcttcttgtgacgtttctgttatggaaaacttgactcaaactgttaagaacaagttggctaacgctccaccagttagagctgttttccacttggctgctgtttacgacgacgttccaatttctaaggttactgctgaaaacatttctaacgttcacaacccaaaggttttgggtgctattaacttgcacagattgtctattattaactgttggaagttgtctcacttcattttgttctcttctattactggtgttattggttactacgaccaagctgcttacaactctgctaacgctgttttggactctttggctaacttcagaagacaagctggtttgccagctttggctattaactggggtccattggacgcttctggtaaggttgctgaaaacgaagctattcaatctttgttcgcttctagaggtttgccagttttgtctattggtaagttcttcggtgctttggaagctgctttgaaccaatctaacgttttgaacacttctggtgctttgaacttgtaccaattggttattactccaatggttacttctttgttcttcgactcttacgaacacatgagaccaaagatggaacacttgatttacgctggttctgaaagaaacgctagatcttcttcttcttctaacggtggtattggtggtgcttctcaaaaggaatctttcacttctgaatctgttttggaaaagttgactaacaaggtttctgacttgttgtctattaacaagtctaagttgaacttggacactaagttgaaggactacggtttggactctttgttgactgttcaattcaagggttggattgacaaggaattcgaaaacaagaacttgttctctcacattcaattgtcttcttcttctattaacgacttggttgaaaaggttgttcaagctaagggtattccatctactggtgtttctgctaaggctgctgctgttactaagaagccagttttggctaagactactactccagcttctttgccaaacccaaacatggttgttggttctactactccagttgctgaagaaccagttaaggttaagtcttctccaatggttcaaaagccaatgcaacaaccaaagcaacaccacttgattggttctccaaagatttctgctaacgtttctagaaaccactctttgccatcttctgttgcttctccattgccaccattgtctgctgcttctgctgctgctgctgctgctgcttctactaactcttcttcttctccaatgaagcacccagctgctattgttaacagaagattgtcttctattatgtctccatctttgatgcaaactgctccaacttctaacaacaacccatacattttgggtattggtactgctgttccaaacgaaccattgaagcaatctgaattgtctgctgttatgtctaaggacttctcttctgacccattggttgttgacaaggtttctaagattttcgaacaatctcaaattaacactagatacttgtacagaaacccattgagagaagaaactgctttgagacacagaaagaacgaaaacattaacgacgttaacagacaattccaaaagtgtgctccagacttgtctcaaagagcttgtgaaaaggctattaaggaatggggtggttctattcaagacattactcacattgtttctgtttcttctactggtgttgttgttccagacattaacttcgttttgattcaaagattgggtttgaacaaggacattgaaagattgtctgttaacttcatgggttgtttggctggtttgtcttctatgagagctgctgttccattggcttctaagcacccaaagaacagagttttggttgtttgtactgaaatttgttctactcacttctctactaaggaaggtgttgaccaaattgttgcttctactattttcgctgacggttctgctgcttacattttgggttgtaacccaactatttacgaacacccattgttcgaagttattggttctatgactagatctgttccagacactgctcacactatgacttgggacatttctactgacggttgggacttgggtttggaccaatctattccacaccacattggtggtggtattgaatctttcgttaacgacttgttggctaagaacaagtctcaaactcaagacttgactccaaaggaatgtgaattcttgattcacactggtggtaaggctattttgatgtctattgaacaatctttgggtattacttctaagcaaaaccaacactcttgggacatttacagaaactacggtaacatgtcttctgcttctgttattttcgttttggaacacgctagacactctaagtctttgccacaatactctatttctttggctttcggtccaggtttggctttcgaaggttgtgttttgaagaacatggtttgaacagaagacgggagacactagcacacaactttaccaggcaaggtatttgacgctagcatgtgtccaattcagtgtcatttatgattttttgtagtaggatataaatatatacagcgctccaaatagtgcggttgccccaaaaacaccacggaacctcatctgttctcgtactttgttgtgacaaagtagctcactgccttattatcacattttcattatgcaacgcttcggaaaatacgatgttgaaaatgcctctagagatgaaaaacaatcgtaaaagggtcctgcgtaattgaaacatttgatcagtatgcagtggcacagaaacaaccaggaatactatagtcataggcaatacaaggtatatattggctatgcagacccctccagaaagtaccgacgtcaagttagatacacttaacgaacctagtgcacatttaattgagaaaaatgtggctcttcctaaggacatattccgttcgtacttgagttattggatctatgaaatcgctcgctatacaccagtcatgattttgtcggcgcgccctcgagtaagcttggtaccgcggctagctaagatccgctctaaccgaaaaggaaggagttagacaacctgaagtctaggtccctatttatttttttatagttatgttagtattaagaacgttatttatatttcaaatttttcttttttttctgtacagacgcgtgtacgcatgtaacattatactgaaaaccttgcttgagaaggttttgggacgctcgaagatccagctgcattaatgaatcggccaacgcgcggggagaggcggtttgcgtattgggcgctcttccgcttcctcgctcactgactcgctgcgctcggtcgttcggctgcggcgagcggtatcagctcactcaaaggcggtaatacggttatccacagaatcaggggataacgcaggaaagaacatgtgagcaaaaggccagcaaaaggccaggaaccgtaaaaaggccgcgttgctggcgtttttccataggctccgcccccctgacgagcatcacaaaaatcgacgctcaagtcagaggtggcgaaacccgacaggactataaagataccaggcgtttccccctggaagctccctcgtgcgctctcctgttccgaccctgccgcttaccggatacctgtccgcctttctcccttcgggaagcgtggcgctttctcatagctcacgctgtaggtatctcagttcggtgtaggtcgttcgctccaagctgggctgtgtgcacgaaccccccgttcagcccgaccgctgcgccttatccggtaactatcgtcttgagtccaacccggtaagacacgacttatcgccactggcagcagccactggtaacaggattagcagagcgaggtatgtaggcggtgctacagagttcttgaagtggtggcctaactacggctacactagaaggacagtatttggtatctgcgctctgctgaagccagttaccttcggaaaaagagttggtagctcttgatccggcaaacaaaccaccgctggtagcggtggtttttttgtttgcaagcagcagattacgcgcagaaaaaaaggatctcaagaagatcctttgatcttttctacggggtctgacgctcagtggaacgaaaactcacgttaagggattttggtcatgagattatcaaaaaggatcttcacctagatccttttaaattaaaaatgaagttttaaatcaatctaaagtatatatgagtaaacttggtctgacagttaccaatgcttaatcagtgaggcacctatctcagcgatctgtctatttcgttcatccatagttgcctgactccccgtcgtgtagataactacgatacgggagggcttaccatctggccccagtgctgcaatgataccgcgagacccacgctcaccggctccagatttatcagcaataaaccagccagccggaagggccgagcgcagaagtggtcctgcaactttatccgcctccatccagtctattaattgttgccgggaagctagagtaagtagttcgccagttaatagtttgcgcaacgttgttgccattgctacaggcatcgtggtgtcacgctcgtcgtttggtatggcttcattcagctccggttcccaacgatcaaggcgagttacatgatcccccatgttgtgcaaaaaagcggttagctccttcggtcctccgatcgttgtcagaagtaagttggccgcagtgttatcactcatggttatggcagcactgcataattctcttactgtcatgccatccgtaagatgcttttctgtgactggtgagtactcaaccaagtcattctgagaatagtgtatgcggcgaccgagttgctcttgcccggcgtcaatacgggataataccgcgccacatagcagaactttaaaagtgctcatcattggaaaacgttcttcggggcgaaaactctcaaggatcttaccgctgttgagatccagttcgatgtaacccactcgtgcacccaactgatcttcagcatcttttactttcaccagcgtttctgggtgagcaaaaacaggaaggcaaaatgccgcaaaaaagggaataagggcgacacggaaatgttgaatactcatactcttcctttttcaatattattgaagcatttatcagggttattgtctcatgagcggatacatatttgaatgtatttagaaaaataaacaaataggggttccgcgcacatttccccgaaaagtgccacctgaacgaagcatctgtgcttcattttgtagaacaaaaatgcaacgcgagagcgctaatttttcaaacaaagaatctgagctgcatttttacagaacagaaatgcaacgcgaaagcgctattttaccaacgaagaatctgtgcttcatttttgtaaaacaaaaatgcaacgcgagagcgctaatttttcaaacaaagaatctgagctgcatttttacagaacagaaatgcaacgcgagagcgctattttaccaacaaagaatctatacttcttttttgttctacaaaaatgcatcccgagagcgctatttttctaacaaagcatcttagattactttttttctcctttgtgcgctctataatgcagtctcttgataactttttgcactgtaggtccgttaaggttagaagaaggctactttggtgtctattttctcttccataaaaaaagcctgactccacttcccgcgtttactgattactagcgaagctgcgggtgcattttttcaagataaaggcatccccgattatattctataccgatgtggattgcgcatactttgtgaacagaaagtgatagcgttgatgattcttcattggtcagaaaattatgaacggtttcttctattttgtctctatatactacgtataggaaatgtttacattttcgtattgttttcgattcactctatgaatagttcttactacaatttttttgtctaaagagtaatactagagataaacataaaaaatgtagaggtcgagtttagatgcaagttcaaggagcgaaaggtggatgggtaggttatatagggatatagcacagagatatatagcaaagagatacttttgagcaatgtttgtggaagcggtattcgcaatattttagtagctcgttacagtccggtgcgtttttggttttttgaaagtgcgtcttcagagcgcttttggttttcaaaagcgctctgaagttcctatactttctagagaataggaacttcggaataggaacttcaaagcgtttccgaaaacgagcgcttccgaaaatgcaacgcgagctgcgcacatacagctcactgttcacgtcgcacctatatctgcgtgttgcctgtatatatatatacatgagaagaacggcatagtgcgtgtttatgcttaaatgcgtacttatatgcgtctatttatgtaggatgaaaggtagtctagtacctcctgtgatattatcccattccatgcggggtatcgtatgcttccttcagcactaccctttagctgttctatatgctgccactcctcaattggattagtctcatccttcaatgctatcatttcctttgatattggatcatactaagaaaccattattatcatgacattaacctataaaaataggcgtatcacgaggccctttcgtc

SEQ ID NO: 474 - DNA, 16888 bp, Artificial Sequence
  Plasmid
  exon (3486)..(12716)
sctratcgcgcgtttcggtgatgacggtgaaaacctctgacacatgcagctcccggagacggtcacagcttgtctgtaagcggatgccgggagcagacaagcccgtcagggcgcgtcagcgggtgttggcgggtgtcggggctggcttaactatgcggcatcagagcagattgtactgagagtgcaccataccacagcttttcaattcaattcatcattttttttttattcttttttttgatttcggtttctttgaaatttttttgattcggtaatctccgaacagaaggaagaacgaaggaaggagcacagacttagattggtatatatacgcatatgtagtgttgaagaaacatgaaattgcccagtattcttaacccaactgcacagaacaaaaacctgcaggaaacgaagataaatcatgtcgaaagctacatataaggaacgtgctgctactcatcctagtcctgttgctgccaagctatttaatatcatgcacgaaaagcaaacaaacttgtgtgcttcattggatgttcgtaccaccaaggaattactggagttagttgaagcattaggtcccaaaatttgtttactaaaaacacatgtggatatcttgactgatttttccatggagggcacagttaagccgctaaaggcattatccgccaagtacaattttttactcttcgaagacagaaaatttgctgacattggtaatacagtcaaattgcagtactctgcgggtgtatacagaatagcagaatgggcagacattacgaatgcacacggtgtggtgggcccaggtattgttagcggtttgaagcaggcggcagaagaagtaacaaaggaacctagaggccttttgatgttagcagaattgtcatgcaagggctccctatctactggagaatatactaagggtactgttgacattgcgaagagcgacaaagattttgttatcggctttattgctcaaagagacatgggtggaagagatgaaggttacgattggttgattatgacacccggtgtgggtttagatgacaagggagacgcattgggtcaacagtatagaaccgtggatgatgtggtctctacaggatctgacattattattgttggaagaggactatttgcaaagggaagggatgctaaggtagagggtgaacgttacagaaaagcaggctgggaagcatatttgagaagatgcggccagcaaaactaaaaaactgtattataagtaaatgcatgtatactaaactcacaaattagagcttcaatttaattatatcagttattaccctatgcggtgtgaaataccgcacagatgcgtaaggagaaaataccgcatcaggaaattgtaaacgttaatattttgttaaaattcgcgttaaatttttgttaaatcagctcattttttaaccaataggccgaaatcggcaaaatcccttataaatcaaaagaatagaccgagatagggttgagtgttgttccagtttggaacaagagtccactattaaagaacgtggactccaacgtcaaagggcgaaaaaccgtctatcagggcgatggcccactacgtgaaccatcaccctaatcaagttttttggggtcgaggtgccgtaaagcactaaatcggaaccctaaagggagcccccgatttagagcttgacggggaaagccggcgaacgtggcgagaaaggaagggaagaaagcgaaaggagcgggcgctagggcgctggcaagtgtagcggtcacgctgcgcgtaaccaccacacccgccgcgcttaatgcgccgctacagggcgcgtccattcgccattcaggctgcgcaactgttgggaagggcgatcggtgcgggcctcttcgctattacgccagctgaattggagcgacctcatgctatacctgagaaagcaacctgacctacaggaaagagttactcaagaataagaattttcgttttaaaacctaagagtcactttaaaatttgtatacacttattttttttataacttatttaataataaaaatcataaatcataagaaattcgcttatttagaagtgtcaacaacgtatctaccaacgatttgacccttttccatcttttcgtaaatttctggcaaggtagacaagccgacaaccttgattggagacttgaccaaacctctggcgaagaattgttaattaagagctcagatcttatcgtcgtcatccttgtaatccatcgatactagtgcggccgccctttagtgagggttgaattcgaattttcaaaaattcttactttttttttggatggacgcaaagaagtttaataatcatattacatggcattaccaccatatacatatccatatacatatccatatctaatcttacttatatgttgtggaaatgtaaagagccccattatcttagcctaaaaaaaccttctctttggaactttcagtaatacgcttaactgctcattgctatattgaagtacggattagaagccgccgagcgggtgacagccctccgaaggaagactctcctccgtgcgtcctcgtcttcaccggtcgcgttcctgaaacgcagatgtgcctcgcgccgcactgctccgaacaataaagattctacaatactagcttttatggttatgaagaggaaaaattggcagtaacctggccccacaaaccttcaaatgaacgaatcaaattaacaaccataggatgataatgcgattagttttttagccttatttctggggtaattaatcagcgaagcgatgatttttgatctattaacagatatataaatgcaaaaactgcataaccactttaactaatactttcaacattttcggtttgtattacttcttattcaaatgtaataaaagtatcaacaaaaaattgttaatatacctctatactttaacgtcaaggagaaaaaaccccggatccgtaatacgactcactatagggcccgggggcgcgccaagcaacaggcgcgttggacttttaattttcgaggaccgcgaatccttacatcacacccaatcccccacaagtgatcccccacacaccatagcttcaaaatgtttctactccttttttactcttccagattttctcggactccgcgcatcgccgtaccacttcaaaacacccaagcacagcatactaaatttcccctctttcttcctctagggtgtcgttaattacccgtactaaaggtttggaaaagaaaaaagagaccgcctcgtttctttttcttcgtcgaaaaaggcaataaaaatttttatcacgtttctttttcttgaaaatttttttttttgatttttttctctttcgatgacctcccattgatatttaagttaataaacggtcttcaatttctcaagtttcagtttcatttttcttgttctattacaactttttttacttcttgctcattagaaagaaagcatagcaatctaatctaagttttaataaacaaaacaatgactaacaacaacaacaacaaggttgctattgttggtttgggtttcagattgccaggtggttctaagactccaactgaattgtggtctcaattgttgcaaggtttcgacggtgtttctgttgttactaaggacagatggtcttctacttacaacgacactgacatgattaacaacaagtacggtggtttcttgaacatgaacgaatggaagtgtttcgactctttgttcttcggtatttctccaaaggaagctccattgattgacccacaacaaagaattttgttgactttggtttgggaagctttggaagacgctggtatttctccaactattttgagaggtactgacactggtgttttcatgggtgtttctaaccacgactacatgaagttgcaatacaaggacgtttctgaacaatctccatacgctatgactggttctaacgcttctattatttctaacagaatttcttactgttacgacttcagaggtccatctttgactgttgacactgcttgttcttcttctttggcttctgtttctttgggtttgcaatctattgctaacggtgactgtaaggttgctatttgtggtggtgttaacgctttgttggacccatctacttctgttgctttctcttctttgggtgttttgaacccagacggtagatgtaagactttcgacgctgacgctaacggttacgttagaggtgaaggtgctggtattgttattttgaagtctttggaacaagctgaaaaggacaagaacagaatttacggtgttattttgggttctaacatgaacgaagacggttctttcgacaagtcttctttgactactccatctggtgaatctcaatctaagaacattgcttctgctttggaaaagtctgaattggctgctaacgacatttactacgttgaatgtcacggtactggtactccagttggtgacccaattgaagttggtgctttgtctaacgttttcacttctaaccactctcaagacttcccattgaaggttggttctttcaagactaacattggtcacttggaatctgctgctggtattgcttctttgattaagtcttctttgatgttgaagaacagaatgttggttccatctattcacttcaaccaaccaaacccaaagattccattcgaccaataccacattcaagttgttaacgaaattgaagttttcccagaagaccaaattgttaacattggtattaactctttcggtttcggtggtgctaactgtcacttggttgttcaagaatacattaaccaagaaccagactactctttggctgaaaaggaaaagtactacatggttccaacttcttctaactctgaatggtctttggacaagtacgaacaagaagttaaggacaacactaactaccaccacatgattaacttccaagaattcgctttgcaccaatctactatgaaggctaacttgttgcacagaaaggttgttattgctaaggactggaaggaatacttggaaggtactaacccagctatttctaacgttttgtcttcttctgacaacgttccaggtgaagacattccagtttgtttcgttttcgttggtcaaggtccacaatggaacggtatgggtagaaagttgtacgaagctgaaccagttttcaaggacactattgacatttgtgacgacttgttgaagaagtactgtggttactctgtttgggaaaagattggttctattgctgaagacgaccaaattactattaacactccaattattgctcaaccagctttgttcttgattcaaatgggtttggttgctttgtacggtaagttcggtattcaaccatctatggttattggtcactctttcggtgaagttacttctgcttacttctctggtgctatttctttggaatctgctattaagattgtttactacagatctatgttgcaaaacaagactattggttctggtaagatgttggctatttctttgggttctcaatctttcgacgaaaagtacggtaacgaattccacgacttggaaattgcttgttacaacgctccagaatctattgttgttactggtaaggaagacagattgaaggaattggcttctcaattgactaaggaaggtattttcaacgctttcttgaagtctccatgttctttccactcttcttaccaaaaggctattaagaaggaagttttggaatctttggctgacttgccatctactttcagaccaatggttccattgttctctactgtttacggtgacttgcaaactactccagttgacgctcaatacatttacaagaacttgagagaaccagttcacttcgaaaaggctatttctaacttgtctaagtacactaagtctaaccaacacaagagattggtttacttggaaattactccacacccaactttggcttacttgattaacaagtgtggtaacgctggtttgagaactaacgttatgtctgctttgcacagatctaaggacgaattgttgactttctactcttctgttgctcaattgtactgtcaaggtgttaacattgacttcggtactcaattcgacgaatctattttgtctactaacttgtggaaggaagttactaacattttgccaagataccaatgggaatctgacactcaatactggaacgaatctttgtactctcacgacttgagattgaagggtccaactattgacttgattggttggaagaagcacttgaacggtcaagaatctttcgaaactattattgacgttaagaagaactgttacgcttacttgaaggaccacaaggttagaggtaagccaattttcccaggtgctggttacttggacattattttggaagctgttgaatacttggaaaagcactctaacgaccaattgactgctgctcacacttctattttgattcaatctattgaattcttgtctccattcttcttggttgaaggtgaacaacaacacttgcaaactactattgacagaatttctaagaacgtttaccaattccaattctaccaaaaggactctattaaccaaaagaagtggtctaagatgtgtaaggctaagattcaattgaacccacaatcttcttctcaaattttgaacgacactattttgcaatctttgacttctgttccaaaggttgacttgttgcaattgaaggctgactgtgacgtttgttctattgacagatctgaattgtaccacagaattgttagattgggtttgggttacggtaagcacttccaagttattgacaagttgtgggttggtccaaacttcgaatctttgtgtttgttgtctttcgacggtaacgaagttattgaaaaccacagaaacaactacaagagagttttgaacgctatggttttggacaactgtttccacggtgttttgggtattttggaagactctaaccaacacttcgttgttgaaagagttgacaagatgcaagtttacccacaaactttgttcaaccaaactgacgaaattgaccaattgtacttgtacactagaattttgaacccaactgaccactctactcaagttcacgctacttgtcaattgattggtcaagacggtcaagttattgttgaagttggtagattcactttgaagtctttggaaaagtacaaggttaacactattaagaagccatctgaccaagtttacactattaactggcaatctaaggaatcttctttgccaattccaacttctattatggctgacccaatgactgaattgcacgacaagtctcaagttttggttgacactgacttcgttaactactgttgtttgttgttgaaggaaactttggaaactatttctggttgggactggactaagaagaacgctcaaactatggaacaatacatgaagtctgttggtattgacacttctttcactagattcttgactagattgttcgaaattcactctttggttccatctgctgctgactaccaatctatgtctccaattgacttgaagtctaaggttttggctaagtacccagacgctaacttggaattgactttgattgaaagagctacttctattattccaagattgttgcaaggtgactctactgcttgtcactctttgttcgaaaacaacttgttgtcttctttctacacttcttctactgctgttgactactacttggaacaagttggttctactattcaaaaggctattggtaacattgttactaagtctgaccaagactgtaagaaggttattaagattttggaagttggtggtagaactggttctttgactactaagttgttgactaagttggcttctttgttcgaaggtactacttacgaaaagtctggtgttgaagttgtttacactttcactgacatttctgcttctttcattaactctgacattcaatctaagttccaaaaggttattgaaaagtctaacggttgtattaagatggtttacaagactttgaacttggaattggactacgcttctcaatctttcttgccatctgactacgactgtattgttatgtcttacgttttgcacgctgttgctgacttggaaaagggtattagacaattgtacgacatgttggctccaaacggttggttgatgttcattgaaccatctccaaagatgactttctctgacattgttttcggttgtttccaccaatggtggcaattctctgaccaattcagaactgaacactgtgctattagaccaaacgaatggtctgaattgttgtgtaaccaaattggtggtttcagatacccagtttctttcattaacttcgaagaaaaggaaattggtcaagaccactctttcgttgttcacgctcaaaagcaatctatttctgaattcagagtttctagagactctgttgcttactgttctatgattgttccaggttctgctactttggctaacggtttgactaacaacggtgttaactctccaactattgaaggtagaaagtctttgatttctaagtacttgagagactctttggttttgtgtcaagaaaaggttgacgttattgaaactgaattgttgagaaacccatctttgcaagacgaaaagactattgaagcttctttgtctaagtcttctattgctttcttcatgactggtgttgaaactttgaacggtaactaccaattggttacttaccaattgactaagttgttccaattggctggtgctatggctgaaagaggtgttcacgttccaaagattgttgttttgactaagtgtgctcaaagaacttctaagaactacttgaacgcttctttgattggtttgactagaactgctatgaacgaatacgctgacactgctttgcaaatttactctattgacattgaagaagaagacactgctgacttggctttcattattaagttggtttctatggaaatggctgacaaggaatacattgttaagaaggacggtgctgttttggttccaagattgttccaaaacagacaattgattgaaccagttgacgctaagaagtctcaagttgcttacgaaactaacgttgacaagttgtactgtaagtctaagcaatctttggactaccaattctgtactttgccagaagttttggctccaaacgacattgaaattaaggttcaagctgttggtgttaacttcaaggacaacttgttctacaagggtttgttgccagctgaaattttcagaaagggtgacatttacaacccaccattcggtttggaatgttctggtactattactagaattggttctgctgtttctcaatggaagattggtgaccaagttttgggtttcgctagacactctttggcttctcacgttactacttctcaacacttggttgttcaaaagccagaatctatttcttactctgaagctgcttctttgccagttgtttactgtactgcttaccactctttgttcaaggttaaccacatggacgaagacgaaactgctttgattcactctgctactggtggtgttggtttggcttgtttgaacttgttgaagatgaagggtgctgctgacggttctatttacgctactgttggttctaaggacaagaagaactacttggttcaacaatacggttctatgattaagcacatttactctactagagacaaggaatacgctgctgaattgagaggtaagattgactgtttggttaacactttgtctggtgaatacactcaatctaacttcgaatctatgtcttctttcggtagaattgctgacttgtctgttactcacatttacgctaacgaaccattggacatgggtaacttcaagggtgacattcaatactgtggtgttgacttggaaagattgattgacgaaaagccaaagcaattgcaaaagatgttggaaactattgttggttgggttgctgaaggtaagttgaacaagttgccaattcaagtttacgctgctgaaagatctaaggaagctattgaatctttgggtgaaagaggtcacattggtaagattattattgactgttctgacattttgcaccacgaacaaaagaacgaaaaggttgaagttgctaagtctaactacttggttgacttgaaggacactattattattactggtcaaactggtatttctttgcaaattattgcttggttcattaagcactctaaggtttctcacattattgttatttctaagtcttctttgaagtggaagttggaaaagttgatgaaggaaccacacaagagattggttaacattgttttcgcttcttgtgacgtttctgttatggaaaacttgactcaaactgttaagaacaagttggctaacgctccaccagttagagctgttttccacttggctgctgtttacgacgacgttccaatttctaaggttactgctgaaaacatttctaacgttcacaacccaaaggttttgggtgctattaacttgcacagattgtctattattaactgttggaagttgtctcacttcattttgttctcttctattactggtgttattggttactacgaccaagctgcttacaactctgctaacgctgttttggactctttggctaacttcagaagacaagctggtttgccagctttggctattaactggggtccattggacgcttctggtaaggttgctgaaaacgaagctattcaatctttgttcgcttctagaggtttgccagttttgtctattggtaagttcttcggtgctttggaagctgctttgaaccaatctaacgttttgaacacttctggtgctttgaacttgtaccaattggttattactccaatggttacttctttgttcttcgactcttacgaacacatgagaccaaagatggaacacttgatttacgctggttctgaaagaaacgctagatcttcttcttcttctaacggtggtattggtggtgcttctcaaaaggaatctttcacttctgaatctgttttggaaaagttgactaacaaggtttctgacttgttgtctattaacaagtctaagttgaacttggacactaagttgaaggactacggtttggactctttgttgactgttcaattcaagggttggattgacaaggaattcgaaaacaagaacttgttctctcacattcaattgtcttcttcttctattaacgacttggttgaaaaggttgttcaagctaagggtattccatctactggtgtttctgctaaggctgctgctgttactaagaagccagttttggctaagactactactccagcttctttgccaaacccaaacatggttgttggttctactactccagttgctgaagaaccagttaaggttaagtcttctccaatggttcaaaagccaatgcaacaaccaaagcaacaccacttgattggttctccaaagatttctgctaacgtttctagaaaccactctttgccatcttctgttgcttctccattgccaccattgtctgctgcttctgctgctgctgctgctgctgcttctactaactcttcttcttctccaatgaagcacccagctgctattgttaacagaagattgtcttctattatgtctccatctttgatgcaaactgctccaacttctaacaacaacccatacattttgggtattggtactgctgttccaaacgaaccattgaagcaatctgaattgtctgctgttatgtctaaggacttctcttctgacccattggttgttgacaaggtttctaagattttcgaacaatctcaaattaacactagatacttgtacagaaacccattgagagaagaaactgctttgagacacagaaagaacgaaaacattaacgacgttaacagacaattccaaaagtgtgctccagacttgtctcaaagagcttgtgaaaaggctattaaggaatggggtggttctattcaagacattactcacattgtttctgtttcttctactggtgttgttgttccagacattaacttcgttttgattcaaagattgggtttgaacaaggacattgaaagattgtctgttaacttcatgggttgtttggctggtttgtcttctatgagagctgctgttccattggcttctaagcacccaaagaacagagttttggttgtttgtactgaaatttgttctactcacttctctactaaggaaggtgttgaccaaattgttgcttctactattttcgctgacggttctgctgcttacattttgggttgtaacccaactatttacgaacacccattgttcgaagttattggttctatgactagatctgttccagacactgctcacactatgacttgggacatttctactgacggttgggacttgggtttggaccaatctattccacaccacattggtggtggtattgaatctttcgttaacgacttgttggctaagaacaagtctcaaactcaagacttgactccaaaggaatgtgaattcttgattcacactggtggtaaggctattttgatgtctattgaacaatctttgggtattacttctaagcaaaaccaacactcttgggacatttacagaaactacggtaacatgtcttctgcttctgttattttcgttttggaacacgctagacactctaagtctttgccacaatactctatttctttggctttcggtccaggtttggctttcgaaggttgtgttttgaagaacatggtttgaacagaagacgggagacactagcacacaactttaccaggcaaggtatttgacgctagcatgtgtccaattcagtgtcatttatgattttttgtagtaggatataaatatatacagcgctccaaatagtgcggttgccccaaaaacaccacggaacctcatctgttctcgtactttgttgtgacaaagtagctcactgccttattatcacattttcattatgcaacgcttcggaaaatacgatgttgaaaatgcctctagagatgaaaaacaatcgtaaaagggtcctgcgtaattgaaacatttgatcagtatgcagtggcacagaaacaaccaggaatactatagtcataggcaatacaaggtatatattggctatgcagacccctccagaaagtaccgacgtcaagttagatacacttaacgaacctagtgcacatttaattgagaaaaatgtggctcttcctaaggacatattccgttcgtacttgagttattggatctatgaaatcgctcgctatacaccagtcatgattttgtcggcgcgccctcgagtaagcttggtaccgcggctagctaagatccgctctaaccgaaaaggaaggagttagacaacctgaagtctaggtccctatttatttttttatagttatgttagtattaagaacgttatttatatttcaaatttttcttttttttctgtacagacgcgtgtacgcatgtaacattatactgaaaaccttgcttgagaaggttttgggacgctcgaagatccagctgcattaatgaatcggccaacgcgcggggagaggcggtttgcgtattgggcgctcttccgcttcctcgctcactgactcgctgcgctcggtcgttcggctgcggcgagcggtatcagctcactcaaaggcggtaatacggttatccacagaatcaggggataacgcaggaaagaacatgtgagcaaaaggccagcaaaaggccaggaaccgtaaaaaggccgcgttgctggcgtttttccataggctccgcccccctgacgagcatcacaaaaatcgacgctcaagtcagaggtggcgaaacccgacaggactataaagataccaggcgtttccccctggaagctccctcgtgcgctctcctgttccgaccctgccgcttaccggatacctgtccgcctttctcccttcgggaagcgtggcgctttctcatagctcacgctgtaggtatctcagttcggtgtaggtcgttcgctccaagctgggctgtgtgcacgaaccccccgttcagcccgaccgctgcgccttatccggtaactatcgtcttgagtccaacccggtaagacacgacttatcgccactggcagcagccactggtaacaggattagcagagcgaggtatgtaggcggtgctacagagttcttgaagtggtggcctaactacggctacactagaaggacagtatttggtatctgcgctctgctgaagccagttaccttcggaaaaagagttggtagctcttgatccggcaaacaaaccaccgctggtagcggtggtttttttgtttgcaagcagcagattacgcgcagaaaaaaaggatctcaagaagatcctttgatcttttctacggggtctgacgctcagtggaacgaaaactcacgttaagggattttggtcatgagattatcaaaaaggatcttcacctagatccttttaaattaaaaatgaagttttaaatcaatctaaagtatatatgagtaaacttggtctgacagttaccaatgcttaatcagtgaggcacctatctcagcgatctgtctatttcgttcatccatagttgcctgactccccgtcgtgtagataactacgatacgggagggcttaccatctggccccagtgctgcaatgataccgcgagacccacgctcaccggctccagatttatcagcaataaaccagccagccggaagggccgagcgcagaagtggtcctgcaactttatccgcctccatccagtctattaattgttgccgggaagctagagtaagtagttcgccagttaatagtttgcgcaacgttgttgccattgctacaggcatcgtggtgtcacgctcgtcgtttggtatggcttcattcagctccggttcccaacgatcaaggcgagttacatgatcccccatgttgtgcaaaaaagcggttagctccttcggtcctccgatcgttgtcagaagtaagttggccgcagtgttatcactcatggttatggcagcactgcataattctcttactgtcatgccatccgtaagatgcttttctgtgactggtgagtactcaaccaagtcattctgagaatagtgtatgcggcgaccgagttgctcttgcccggcgtcaatacgggataataccgcgccacatagcagaactttaaaagtgctcatcattggaaaacgttcttcggggcgaaaactctcaaggatcttaccgctgttgagatccagttcgatgtaacccactcgtgcacccaactgatcttcagcatcttttactttcaccagcgtttctgggtgagcaaaaacaggaaggcaaaatgccgcaaaaaagggaataagggcgacacggaaatgttgaatactcatactcttcctttttcaatattattgaagcatttatcagggttattgtctcatgagcggatacatatttgaatgtatttagaaaaataaacaaataggggttccgcgcacatttccccgaaaagtgccacctgaacgaagcatctgtgcttcattttgtagaacaaaaatgcaacgcgagagcgctaatttttcaaacaaagaatctgagctgcatttttacagaacagaaatgcaacgcgaaagcgctattttaccaacgaagaatctgtgcttcatttttgtaaaacaaaaatgcaacgcgagagcgctaatttttcaaacaaagaatctgagctgcatttttacagaacagaaatgcaacgcgagagcgctattttaccaacaaagaatctatacttcttttttgttctacaaaaatgcatcccgagagcgctatttttctaacaaagcatcttagattactttttttctcctttgtgcgctctataatgcagtctcttgataactttttgcactgtaggtccgttaaggttagaagaaggctactttggtgtctattttctcttccataaaaaaagcctgactccacttcccgcgtttactgattactagcgaagctgcgggtgcattttttcaagataaaggcatccccgattatattctataccgatgtggattgcgcatactttgtgaacagaaagtgatagcgttgatgattcttcattggtcagaaaattatgaacggtttcttctattttgtctctatatactacgtataggaaatgtttacattttcgtattgttttcgattcactctatgaatagttcttactacaatttttttgtctaaagagtaatactagagataaacataaaaaatgtagaggtcgagtttagatgcaagttcaaggagcgaaaggtggatgggtaggttatatagggatatagcacagagatatatagcaaagagatacttttgagcaatgtttgtggaagcggtattcgcaatattttagtagctcgttacagtccggtgcgtttttggttttttgaaagtgcgtcttcagagcgcttttggttttcaaaagcgctctgaagttcctatactttctagagaataggaacttcggaataggaacttcaaagcgtttccgaaaacgagcgcttccgaaaatgcaacgcgagctgcgcacatacagctcactgttcacgtcgcacctatatctgcgtgttgcctgtatatatatatacatgagaagaacggcatagtgcgtgtttatgcttaaatgcgtacttatatgcgtctatttatgtaggatgaaaggtagtctagtacctcctgtgatattatcccattccatgcggggtatcgtatgcttccttcagcactaccctttagctgttctatatgctgccactcctcaattggattagtctcatccttcaatgctatcatttcctttgatattggatcatactaagaaaccattattatcatgacattaacctataaaaataggcgtatcacgaggccctttcgtc

SEQ ID NO: 475 - DNA, 16669 bp, Artificial Sequence
  Plasmid
  exon (3486)..(12497)
sctratcgcgcgtttcggtgatgacggtgaaaacctctgacacatgcagctcccggagacggtcacagcttgtctgtaagcggatgccgggagcagacaagcccgtcagggcgcgtcagcgggtgttggcgggtgtcggggctggcttaactatgcggcatcagagcagattgtactgagagtgcaccataccacagcttttcaattcaattcatcattttttttttattcttttttttgatttcggtttctttgaaatttttttgattcggtaatctccgaacagaaggaagaacgaaggaaggagcacagacttagattggtatatatacgcatatgtagtgttgaagaaacatgaaattgcccagtattcttaacccaactgcacagaacaaaaacctgcaggaaacgaagataaatcatgtcgaaagctacatataaggaacgtgctgctactcatcctagtcctgttgctgccaagctatttaatatcatgcacgaaaagcaaacaaacttgtgtgcttcattggatgttcgtaccaccaaggaattactggagttagttgaagcattaggtcccaaaatttgtttactaaaaacacatgtggatatcttgactgatttttccatggagggcacagttaagccgctaaaggcattatccgccaagtacaattttttactcttcgaagacagaaaatttgctgacattggtaatacagtcaaattgcagtactctgcgggtgtatacagaatagcagaatgggcagacattacgaatgcacacggtgtggtgggcccaggtattgttagcggtttgaagcaggcggcagaagaagtaacaaaggaacctagaggccttttgatgttagcagaattgtcatgcaagggctccctatctactggagaatatactaagggtactgttgacattgcgaagagcgacaaagattttgttatcggctttattgctcaaagagacatgggtggaagagatgaaggttacgattggttgattatgacacccggtgtgggtttagatgacaagggagacgcattgggtcaacagtatagaaccgtggatgatgtggtctctacaggatctgacattattattgttggaagaggactatttgcaaagggaagggatgctaaggtagagggtgaacgttacagaaaagcaggctgggaagcatatttgagaagatgcggccagcaaaactaaaaaactgtattataagtaaatgcatgtatactaaactcacaaattagagcttcaatttaattatatcagttattaccctatgcggtgtgaaataccgcacagatgcgtaaggagaaaataccgcatcaggaaattgtaaacgttaatattttgttaaaattcgcgttaaatttttgttaaatcagctcattttttaaccaataggccgaaatcggcaaaatcccttataaatcaaaagaatagaccgagatagggttgagtgttgttccagtttggaacaagagtccactattaaagaacgtggactccaacgtcaaagggcgaaaaaccgtctatcagggcgatggcccactacgtgaaccatcaccctaatcaagttttttggggtcgaggtgccgtaaagcactaaatcggaaccctaaagggagcccccgatttagagcttgacggggaaagccggcgaacgtggcgagaaaggaagggaagaaagcgaaaggagcgggcgctagggcgctggcaagtgtagcggtcacgctgcgcgtaaccaccacacccgccgcgcttaatgcgccgctacagggcgcgtccattcgccattcaggctgcgcaactgttgggaagggcgatcggtgcgggcctcttcgctattacgccagctgaattggagcgacctcatgctatacctgagaaagcaacctgacctacaggaaagagttactcaagaataagaattttcgttttaaaacctaagagtcactttaaaatttgtatacacttattttttttataacttatttaataataaaaatcataaatcataagaaattcgcttatttagaagtgtcaacaacgtatctaccaacgatttgacccttttccatcttttcgtaaatttctggcaaggtagacaagccgacaaccttgattggagacttgaccaaacctctggcgaagaattgttaattaagagctcagatcttatcgtcgtcatccttgtaatccatcgatactagtgcggccgccctttagtgagggttgaattcgaattttcaaaaattcttactttttttttggatggacgcaaagaagtttaataatcatattacatggcattaccaccatatacatatccatatacatatccatatctaatcttacttatatgttgtggaaatgtaaagagccccattatcttagcctaaaaaaaccttctctttggaactttcagtaatacgcttaactgctcattgctatattgaagtacggattagaagccgccgagcgggtgacagccctccgaaggaagactctcctccgtgcgtcctcgtcttcaccggtcgcgttcctgaaacgcagatgtgcctcgcgccgcactgctccgaacaataaagattctacaatactagcttttatggttatgaagaggaaaaattggcagtaacctggccccacaaaccttcaaatgaacgaatcaaattaacaaccataggatgataatgcgattagttttttagccttatttctggggtaattaatcagcgaagcgatgatttttgatctattaacagatatataaatgcaaaaactgcataaccactttaactaatactttcaacattttcggtttgtattacttcttattcaaatgtaataaaagtatcaacaaaaaattgttaatatacctctatactttaacgtcaaggagaaaaaaccccggatccgtaatacgactcactatagggcccgggggcgcgccaagcaacaggcgcgttggacttttaattttcgaggaccgcgaatccttacatcacacccaatcccccacaagtgatcccccacacaccatagcttcaaaatgtttctactccttttttactcttccagattttctcggactccgcgcatcgccgtaccacttcaaaacacccaagcacagcatactaaatttcccctctttcttcctctagggtgtcgttaattacccgtactaaaggtttggaaaagaaaaaagagaccgcctcgtttctttttcttcgtcgaaaaaggcaataaaaatttttatcacgtttctttttcttgaaaatttttttttttgatttttttctctttcgatgacctcccattgatatttaagttaataaacggtcttcaatttctcaagtttcagtttcatttttcttgttctattacaactttttttacttcttgctcattagaaagaaagcatagcaatctaatctaagttttaataaacaaaacaatgcataataatattaataattctttgccaaaagatattgctgttattggtattggtttgagattgccaggtaattctaataatccagaatctttgtggaataatttgttggaatcttttgatgctattactcaagttccaaaagatagatgggcttcttcttataaagatatgaatttgattaataataaatatggtggttttttgcaagattctcaatggaaaaattttgatccattgttttttggtatttctccagctgaagctccatttattgatccacaacaaagattgttgttgtctattgtttgggaatctttggaagatgctcatattaaaccagaatctttgagaggttctaatactggtgtttttgttggtgtttctaatattgattattctaaaatggtttttcaagataattataaaattgctccatatactattactggtactaatacttctttgaattctaatagaatttcttattgttatgattttagaggtccatctatgactgttgatactgcttgttcttcttctttgatttctgttggtttgggtgttcaagctattcaatctggtgaatgtgatttggctgtttgtggtggtgttaatgctttgtttgatccaactacttctattgctttttctaaattgggtgttttgaatgaaaatggtagatgtaatactttttctgatcaagctaatggttatgttagatctgaaggtgctggtgttgttttgttgaaatctttgtctcaagctgaaaaagatggtgatagaatttatggtgttattaaaggtgtttctactaatgaagatggttctttgaataaaaattctttgactactccatctactgaatctcaatctaataatattaataatgctatgaaaaaatctactttgtctccaaatgatatttattatattgaagctcatggtactggtactaaagttggtgatccaattgaagttcaatctatttctaatgttttttctaaagatagaaatcaagttgaagatattgaaccattgtttattggttcttttaaatctaatattggtcatttggaatctgctgctggtattgcttctttgattaaagtttgtttgatgttgaaaaatagaattttggttccatctattaattgttctaaattgaatccagctattccatttgataattataaaattaaagttgttagagaagttcaaatgtttccaaataataaaactattaatattggtattaattcttttggttttggtggttctaattgtcatttgattattcaagaatataataaaccaactgatattaaatgtaatactttgattagagattctgataataataataaaaattatttgattccattttctatgaattctaaaatttctttggaaaaatatattaatttgattaaaaataataattatcatgaatatattttttttaaagattttgttaaatatcaaattttgtctaaacaatatactttgtctaatagaatgactattattgctaatgattggcaatctttgattaaatcttctaatgaaacttattctcatcaagaatttagaaatcaaactgttgctattactgatggttctattactgatttggtttcttctaatgaaccaattttggtttatgttttttgtggtcaaggtccacaatggaatggtatgatgaaaactttgtatagaactgaaccagtttttaaaaattctgttgattatattgatcaagttttgtctaaatattttggttattctatttttcaaaaattttcttctatttctgataatgatgattctattaatcatccagttattgctcaaccatctttgtttttgttgcaaattggtttggttgaattgtttaaatattggggtatttttccatctatttctattggtcattcttttggtgaagtttcttcttattatttgtctggtttgatttctttggaaactgtttgtagaattgtttatgttagatctttttatcaaaatcaaactatgggtactggtaaaatgttggtttgttctatttctaatgaacaatggttgtctgaatattctactttgttttctgatttggaaattgcttgtattaattcttctgattctattgttgttactggtaatgaattgagattgaaagaatttgctaatattttgaatgaatctcaaatttttaatacttttttgagatctccatgttcttttcattcttctaaacaagaaattattaaagattctattttttctgaattggttaatgttgaatctaaagaatctactgaaattccattgttttctactgttactggtgaattggttaatgaaccattgtctgctactactatttatgaaaatgttagaaaaccagttttgtttaaaaattctattgaatctttgattaaattttatcatcaacaacaaccatctcaacaaagacaattgatttttattgaaattgctccacatccaactttgggttctttgattaaaaaaactattcaagaatctgttgttccatttaaaactcaaccattgattattgctccattgaatagaaaagaaaatcaagatatttctattaaaaaattgatttctcaattgtattttaatggtattaatattgattttaaatttcaattggatcaagatgaaaatcaagattcttcttttaaagaaactactaattctttgccaagatatcaatgggatgattctgaagaatattgggctgaaccatctcaatctaaaaaaaatagattggaaggtccatcttctactttgttgggttataaaattatttattcttttccagtttatcaaactgttttggatttgcaaaattctaatttttcttatttgttggatcatattgttgctggtaaaccagtttttccaggtgctggttatattgatattattaatcaattttttgttcaaacttctgatattccattgtctaatgaaattatttctattgaatctattcaatttttgcaaccattgatgttgaatcaacataaattgactactttgcaatctttgtttgaaccaactaaaaaatcttctttttctgtttcttttttttctaaagatgaaaaagatgatcaaatttgggttaatacttgtaaagctaaagttactttggaaccaatggaattgtctcaaaatagagttgaagatttggaattgttgaaatctcaatgtaatattactcaattggataaaaaagatttgtatgataaaatttctaaagatttgggtttgttttataatgatgcttttcaaattgttcaatctattcatactggtgttaattgttcttttgctactttgcaaatgccagaatctaatgttactcattcttctattttgaattcttgttttttggataattgttttcatggtttgttgactttgattaatgaaaaaggttcttatgttgttgaatctgttaattctattgctatttttttggaaaatatttctgttgattctgttaattctccattttatttggaaactaaaattattaaatcttctccattttctactgaaggtacttgtagattgtttaataaacaaggtaaattgattttgtctattggtaaatttactattaaatctactaatttgaaaccaaaagttattaatcaattggaaactccattgaatgaaactttttctattgaatggcaatctaaagattctccaattccaccagctaaagaatctccaattaaattggattctttggaattgtttaataaatctactattttgaaagatcaagattttgaaatttattgttcttgtttgatttttaatcaattggttcaatataatccattgtttaaagttttggctactaattttattcaagatcaacaagatgatgctaatgaagaaaattattgtttgtctattatgaaagaattgggtatttctattgattatcaaagatttttttttagaattttgaaaattgttaaattgaatttttctaatttgttgtctaatcaaaaagaaattgatcaattgaaagattctattaaatctaaattttatggtaattctaattctgaagatttggaatttcaatgtattgaaaaagtttctaatattattccaaaattgttgtttgaaaatgataaacaatcttctatgactttgtttgaaaattctttgttgactaaattttatggtcaatctatttctactagattttatttggaatatgttgcttctttggttttggaatctattaaaccaattgttagagaaaaaagagtttttaaaattttggaaattggtgctggtactggttctttgtctaatattgttttggaaaaattgaataaatttttgtctattaattctgataaaaatattattgttgaatataattttactgatatttcttcttcttttattattggtttgcaagaaactatggttactaaatatccaaatatttcttttaaattttctgttttggatttggaaaaagatattaaagatcaagattttttttattctgattatgatattgttttgatggcttatgttattcatgctgtttctaatattacttttgctgttaaacaaatttataatttgttgtctccaagaggttggttgttgtgtattgaaccaaaagctaatattgttttttctgatttggtttttggttgttttggtcaatggtggaattatcaagattctattagaacttctcattgttctttggaatctgaacaatggaaacaagttttgtctgaaaatggttttccaatgaattcttttattggttctttggaatctaattctcattcttttattattcattctcaaaaagaatctattactcaaattaaatcttcttctaaattgtctattgaaaaaatttcttttgttgttaatgaaaatcaaaaattgatggaaccattgttgaatgatgctaatactatttctatgaatccagttgaaattattaaattgaatcaattggatgttgaaaaattgtctatttcttctgttgttttttttatggttggtttggaattgatggaaacttataaagaagaattgtatcaatttattcaattgttgaatcaattgtctttgtctaattttaatggtaaagttgttttggttactaaacaatcttttttgacttctagaaattatttttctagatctttggttgctattgctagatctgctatgaatgaatattctaatttggatattgtttctattgatttggattctaatgattataatttgaattctttgttggttccaattcaatctagattttctgataatgaatttatttataaaaaaggtattttgtttgtttctagattttttaaaaataattctaaattgttgttgtcttctcaatcttttgaaactaatgataataatatgtatcaaactactttgtctgatttgtctattattagaaaagctaaagatgaattgtctaataatgaaattgaaattaaagttaaatctgttggtattaattttaaagataatttgttttataaaggtttgttgccacaagaaatttttagaaaaggtgatattaataatccaccatttggtttggaatgttctggtattatttctagaattggtaatggtgttactgaatttaaagttggtgatcaagtttttggttttgctagacattctttgggttctcatgttattactaataaagatttggttattaaaaaaccagaatctattacttgggatcaagctgcttctattccagttgtttattgtactgcttattattctttgtttaatattgctcatttgaatgataataatgaatctgttttgattcattctgctactggtggtgttggtttggcttctttgaatttgttgaaaatgaaaaaatttgaaaatgtttatgctactgttggttctgaagaaaaaaaacaatatttggaatctaattattcttttattaaatctattttttctactagaactaaagaatattctggtcaattggaaaataaagttgatgttattttgaatactttgtctggtgattttattgaatctaattttaaatctttgaaatcttttggtagattgattgatatttctgttactcatatttatgctaatcaacaaattggtttgggtaattttaaatctgatcatttgtatactgctgttgatttggaaagattgattgatgaaaaaccattgttgttgaaatctattttgtctaaagttactaatgaaattgataatggtaatttggaattgattaaaattaatcaatttaattcttctgaagttaaaactgctgttgaatctttgtctaatagatctcatattggtaaaattgttgtttctaattgtgaaaatatggtttcttcttctgaatctagaattcaaaaaaaaaaatatgatttgaaattggattctactattttgattactggtcaatctggtttgtctattccattgattgaatggttgttgactcattctattgattctgtttctaatgttgttattatttctaaatctccaatgaaatggaaattgcaaaatttggtttttaaatttaaaaatgttaaatttaattatattcaagctgatatttctaattatgatgaaatttatgcttctttgaaatctttgccagatttgccaccaattaaatctgtttttcatttggctgcttgttataatgatgttccaatgaatcaagttactatggatactattgaatctgttcataatccaaaagtttgtggttctattaatttgcatagattgtctatttctttgggttggaatttgtctcattttattttgttttcttctattactggtattactggttatccagatcaatctgtttataattctgctaatattattttggatgctttgtctaatcatagaagagttatgggtttgccatcttttgctattaatttgggtccaatgaaaggtgaaggtaaagtttctgatgttaaagctattaaaaaattgtttaaatctagaggtttgccatctttgtctttgaataaattgtttggtttgttggaagttgttattaataatccattgaaagctgctattccatctcaatttatttgttctccaattgattttaataattatttggatacttttaaaaatatgaatactaaattgtctcatttgtcttctgattctatttctaaagataaagaaaaagaaagagaattgttgtctgattctgtttctattaaagataaagttttggaaaaagtttctgaattgttgtctattccaatttctaaaattaatatggatacttctttgaaaatgtatggtttggattctttgttgtctgttcaatttaaatcttgggttgataatcaatttgaaaaaggtttgattaatcatttggaattgtcttctattactgttaattcttttattgaaaaagttaatactaaatttggtggttcttctgttcaaaaacaaccaattactattgttaaagttattgaaactccaactgctactcaaactactgttccagctattgaattgccacaaaaaccagttaatattaaaactttgtcttgtccattgtctattaaaactccaattttgttgccatctaatgaattgtctgttccattgtttaaatctactgcttcttctccagaattgtctatgactactccaccaattgttaatattagaaatttgaataattctattttggatactccaccattggaatctagaaaaaatcatgttagattgattacttctaatattcatgctccatctcaattgcaaactattcatcaaccaaaacaacaattggcttttaaaactaataataatgcttttattttgggtttgggtaattctgttccaggtgaaccaatttctcaagaaaaattgaaagaatctatttctaatgatttttctaatgatccaaaaactaatgaaaaagttaaaagaatttttgaacaatctcatattaaaactagatatttggttagagattatactaaagaagaaaattctattaaatatagatctaaagaatctattactgatgttaatgaagcttttaaagattgtgttccagatttggctgaaaaagcttgtactaaagctattgctgattggggtggtaataaagaagatattactcatattatgtctgtttcttctactggtgttattattccagatgttaattttaaattgattgataaattgcaattgaatcaagatattgaaagagtttctttgaatatgatgggttgtttggctggtttgtcttctttgagaactgcttcttctttggctaaagcttctccaagaaatagagttttggttgtttgtactgaaatttgttctttgcattttaataatactggtggtggtgatcaaatggttgcttcttctatttttgctgatggtgctgctgcttatattgttggttgttctccaaaaattaatgaaactccattttttgaagttattcaatctattaatagagctactccaaatactgaaaatgctatggtttgggatttgcaaaaagaaggttggaatttgggtttggcttcttctattccacatgttattggtgaaggtattgaaaaatttgttaatgatttgttgtataaagctaaatctcaagtttcttctttgtctccaaaagaatgtgaatttttgattcatactggtggtaaatctattttgatgaatattgaaaatgctttgggtattgatccaaaaatgaataaacatacttgggatatttatcatgcttatggtaatatgtcttctgcttctgttatttttgttttggatcatgctagaaaatctaaaaatttgccaacttattctatttctttggcttttggtccaggtttggcttttgaaggttgtttgttgagaaatttggtttgaacagaagacgggagacactagcacacaactttaccaggcaaggtatttgacgctagcatgtgtccaattcagtgtcatttatgattttttgtagtaggatataaatatatacagcgctccaaatagtgcggttgccccaaaaacaccacggaacctcatctgttctcgtactttgttgtgacaaagtagctcactgccttattatcacattttcattatgcaacgcttcggaaaatacgatgttgaaaatgcctctagagatgaaaaacaatcgtaaaagggtcctgcgtaattgaaacatttgatcagtatgcagtggcacagaaacaaccaggaatactatagtcataggcaatacaaggtatatattggctatgcagacccctccagaaagtaccgacgtcaagttagatacacttaacgaacctagtgcacatttaattgagaaaaatgtggctcttcctaaggacatattccgttcgtacttgagttattggatctatgaaatcgctcgctatacaccagtcatgattttgtcggcgcgccctcgagtaagcttggtaccgcggctagctaagatccgctctaaccgaaaaggaaggagttagacaacctgaagtctaggtccctatttatttttttatagttatgttagtattaagaacgttatttatatttcaaatttttcttttttttctgtacagacgcgtgtacgcatgtaacattatactgaaaaccttgcttgagaaggttttgggacgctcgaagatccagctgcattaatgaatcggccaacgcgcggggagaggcggtttgcgtattgggcgctcttccgcttcctcgctcactgactcgctgcgctcggtcgttcggctgcggcgagcggtatcagctcactcaaaggcggtaatacggttatccacagaatcaggggataacgcaggaaagaacatgtgagcaaaaggccagcaaaaggccaggaaccgtaaaaaggccgcgttgctggcgtttttccataggctccgcccccctgacgagcatcacaaaaatcgacgctcaagtcagaggtggcgaaacccgacaggactataaagataccaggcgtttccccctggaagctccctcgtgcgctctcctgttccgaccctgccgcttaccggatacctgtccgcctttctcccttcgggaagcgtggcgctttctcatagctcacgctgtaggtatctcagttcggtgtaggtcgttcgctccaagctgggctgtgtgcacgaaccccccgttcagcccgaccgctgcgccttatccggtaactatcgtcttgagtccaacccggtaagacacgacttatcgccactggcagcagccactggtaacaggattagcagagcgaggtatgtaggcggtgctacagagttcttgaagtggtggcctaactacggctacactagaaggacagtatttggtatctgcgctctgctgaagccagttaccttcggaaaaagagttggtagctcttgatccggcaaacaaaccaccgctggtagcggtggtttttttgtttgcaagcagcagattacgcgcagaaaaaaaggatctcaagaagatcctttgatcttttctacggggtctgacgctcagtggaacgaaaactcacgttaagggattttggtcatgagattatcaaaaaggatcttcacctagatccttttaaattaaaaatgaagttttaaatcaatctaaagtatatatgagtaaacttggtctgacagttaccaatgcttaatcagtgaggcacctatctcagcgatctgtctatttcgttcatccatagttgcctgactccccgtcgtgtagataactacgatacgggagggcttaccatctggccccagtgctgcaatgataccgcgagacccacgctcaccggctccagatttatcagcaataaaccagccagccggaagggccgagcgcagaagtggtcctgcaactttatccgcctccatccagtctattaattgttgccgggaagctagagtaagtagttcgccagttaatagtttgcgcaacgttgttgccattgctacaggcatcgtggtgtcacgctcgtcgtttggtatggcttcattcagctccggttcccaacgatcaaggcgagttacatgatcccccatgttgtgcaaaaaagcggttagctccttcggtcctccgatcgttgtcagaagtaagttggccgcagtgttatcactcatggttatggcagcactgcataattctcttactgtcatgccatccgtaagatgcttttctgtgactggtgagtactcaaccaagtcattctgagaatagtgtatgcggcgaccgagttgctcttgcccggcgtcaatacgggataataccgcgccacatagcagaactttaaaagtgctcatcattggaaaacgttcttcggggcgaaaactctcaaggatcttaccgctgttgagatccagttcgatgtaacccactcgtgcacccaactgatcttcagcatcttttactttcaccagcgtttctgggtgagcaaaaacaggaaggcaaaatgccgcaaaaaagggaataagggcgacacggaaatgttgaatactcatactcttcctttttcaatattattgaagcatttatcagggttattgtctcatgagcggatacatatttgaatgtatttagaaaaataaacaaataggggttccgcgcacatttccccgaaaagtgccacctgaacgaagcatctgtgcttcattttgtagaacaaaaatgcaacgcgagagcgctaatttttcaaacaaagaatctgagctgcatttttacagaacagaaatgcaacgcgaaagcgctattttaccaacgaagaatctgtgcttcatttttgtaaaacaaaaatgcaacgcgagagcgctaatttttcaaacaaagaatctgagctgcatttttacagaacagaaatgcaacgcgagagcgctattttaccaacaaagaatctatacttcttttttgttctacaaaaatgcatcccgagagcgctatttttctaacaaagcatcttagattactttttttctcctttgtgcgctctataatgcagtctcttgataactttttgcactgtaggtccgttaaggttagaagaaggctactttggtgtctattttctcttccataaaaaaagcctgactccacttcccgcgtttactgattactagcgaagctgcgggtgcattttttcaagataaaggcatccccgattatattctataccgatgtggattgcgcatactttgtgaacagaaagtgatagcgttgatgattcttcattggtcagaaaattatgaacggtttcttctattttgtctctatatactacgtataggaaatgtttacattttcgtattgttttcgattcactctatgaatagttcttactacaatttttttgtctaaagagtaatactagagataaacataaaaaatgtagaggtcgagtttagatgcaagttcaaggagcgaaaggtggatgggtaggttatatagggatatagcacagagatatatagcaaagagatacttttgagcaatgtttgtggaagcggtattcgcaatattttagtagctcgttacagtccggtgcgtttttggttttttgaaagtgcgtcttcagagcgcttttggttttcaaaagcgctctgaagttcctatactttctagagaataggaacttcggaataggaacttcaaagcgtttccgaaaacgagcgcttccgaaaatgcaacgcgagctgcgcacatacagctcactgttcacgtcgcacctatatctgcgtgttgcctgtatatatatatacatgagaagaacggcatagtgcgtgtttatgcttaaatgcgtacttatatgcgtctatttatgtaggatgaaaggtagtctagtacctcctgtgatattatcccattccatgcggggtatcgtatgcttccttcagcactaccctttagctgttctatatgctgccactcctcaattggattagtctcatccttcaatgctatcatttcctttgatattggatcatactaagaaaccattattatcatgacattaacctataaaaataggcgtatcacgaggccctttcgtc

SEQ ID NO: 476 - DNA, 16669 bp, Artificial Sequence
  Plasmid
  exon (3486)..(12497)
sctratcgcgcgtttcggtgatgacggtgaaaacctctgacacatgcagctcccggagacggtcacagcttgtctgtaagcggatgccgggagcagacaagcccgtcagggcgcgtcagcgggtgttggcgggtgtcggggctggcttaactatgcggcatcagagcagattgtactgagagtgcaccataccacagcttttcaattcaattcatcattttttttttattcttttttttgatttcggtttctttgaaatttttttgattcggtaatctccgaacagaaggaagaacgaaggaaggagcacagacttagattggtatatatacgcatatgtagtgttgaagaaacatgaaattgcccagtattcttaacccaactgcacagaacaaaaacctgcaggaaacgaagataaatcatgtcgaaagctacatataaggaacgtgctgctactcatcctagtcctgttgctgccaagctatttaatatcatgcacgaaaagcaaacaaacttgtgtgcttcattggatgttcgtaccaccaaggaattactggagttagttgaagcattaggtcccaaaatttgtttactaaaaacacatgtggatatcttgactgatttttccatggagggcacagttaagccgctaaaggcattatccgccaagtacaattttttactcttcgaagacagaaaatttgctgacattggtaatacagtcaaattgcagtactctgcgggtgtatacagaatagcagaatgggcagacattacgaatgcacacggtgtggtgggcccaggtattgttagcggtttgaagcaggcggcagaagaagtaacaaaggaacctagaggccttttgatgttagcagaattgtcatgcaagggctccctatctactggagaatatactaagggtactgttgacattgcgaagagcgacaaagattttgttatcggctttattgctcaaagagacatgggtggaagagatgaaggttacgattggttgattatgacacccggtgtgggtttagatgacaagggagacgcattgggtcaacagtatagaaccgtggatgatgtggtctctacaggatctgacattattattgttggaagaggactatttgcaaagggaagggatgctaaggtagagggtgaacgttacagaaaagcaggctgggaagcatatttgagaagatgcggccagcaaaactaaaaaactgtattataagtaaatgcatgtatactaaactcacaaattagagcttcaatttaattatatcagttattaccctatgcggtgtgaaataccgcacagatgcgtaaggagaaaataccgcatcaggaaattgtaaacgttaatattttgttaaaattcgcgttaaatttttgttaaatcagctcattttttaaccaataggccgaaatcggcaaaatcccttataaatcaaaagaatagaccgagatagggttgagtgttgttccagtttggaacaagagtccactattaaagaacgtggactccaacgtcaaagggcgaaaaaccgtctatcagggcgatggcccactacgtgaaccatcaccctaatcaagttttttggggtcgaggtgccgtaaagcactaaatcggaaccctaaagggagcccccgatttagagcttgacggggaaagccggcgaacgtggcgagaaaggaagggaagaaagcgaaaggagcgggcgctagggcgctggcaagtgtagcggtcacgctgcgcgtaaccaccacacccgccgcgcttaatgcgccgctacagggcgcgtccattcgccattcaggctgcgcaactgttgggaagggcgatcggtgcgggcctcttcgctattacgccagctgaattggagcgacctcatgctatacctgagaaagcaacctgacctacaggaaagagttactcaagaataagaattttcgttttaaaacctaagagtcactttaaaatttgtatacacttattttttttataacttatttaataataaaaatcataaatcataagaaattcgcttatttagaagtgtcaacaacgtatctaccaacgatttgacccttttccatcttttcgtaaatttctggcaaggtagacaagccgacaaccttgattggagacttgaccaaacctctggcgaagaattgttaattaagagctcagatcttatcgtcgtcatccttgtaatccatcgatactagtgcggccgccctttagtgagggttgaattcgaattttcaaaaattcttactttttttttggatggacgcaaagaagtttaataatcatattacatggcattaccaccatatacatatccatatacatatccatatctaatcttacttatatgttgtggaaatgtaaagagccccattatcttagcctaaaaaaaccttctctttggaactttcagtaatacgcttaactgctcattgctatattgaagtacggattagaagccgccgagcgggtgacagccctccgaaggaagactctcctccgtgcgtcctcgtcttcaccggtcgcgttcctgaaacgcagatgtgcctcgcgccgcactgctccgaacaataaagattctacaatactagcttttatggttatgaagaggaaaaattggcagtaacctggccccacaaaccttcaaatgaacgaatcaaattaacaaccataggatgataatgcgattagttttttagccttatttctggggtaattaatcagcgaagcgatgatttttgatctattaacagatatataaatgcaaaaactgcataaccactttaactaatactttcaacattttcggtttgtattacttcttattcaaatgtaataaaagtatcaacaaaaaattgttaatatacctctatactttaacgtcaaggagaaaaaaccccggatccgtaatacgactcactatagggcccgggggcgcgccaagcaacaggcgcgttggacttttaattttcgaggaccgcgaatccttacatcacacccaatcccccacaagtgatcccccacacaccatagcttcaaaatgtttctactccttttttactcttccagattttctcggactccgcgcatcgccgtaccacttcaaaacacccaagcacagcatactaaatttcccctctttcttcctctagggtgtcgttaattacccgtactaaaggtttggaaaagaaaaaagagaccgcctcgtttctttttcttcgtcgaaaaaggcaataaaaatttttatcacgtttctttttcttgaaaatttttttttttgatttttttctctttcgatgacctcccattgatatttaagttaataaacggtcttcaatttctcaagtttcagtttcatttttcttgttctattacaactttttttacttcttgctcattagaaagaaagcatagcaatctaatctaagttttaataaacaaaacaatgcataataatattaataattctttgccaaaagatattgctgttattggtattggtttgagattgccaggtaattctaataatccagaatctttgtggaataatttgttggaatcttttgatgctattactcaagttccaaaagatagatgggcttcttcttataaagatatgaatttgattaataataaatatggtggttttttgcaagattctcaatggaaaaattttgatccattgttttttggtatttctccagctgaagctccatttattgatccacaacaaagattgttgttgtctattgtttgggaatctttggaagatgctcatattaaaccagaatctttgagaggttctaatactggtgtttttgttggtgtttctaatattgattattctaaaatggtttttcaagataattataaaattgctccatatactattactggtactaatacttctttgaattctaatagaatttcttattgttatgattttagaggtccatctatgactgttgatactgcttgttcttcttctttgatttctgttggtttgggtgttcaagctattcaatctggtgaatgtgatttggctgtttgtggtggtgttaatgctttgtttgatccaactacttctattgctttttctaaattgggtgttttgaatgaaaatggtagatgtaatactttttctgatcaagctaatggttatgttagatctgaaggtgctggtgttgttttgttgaaatctttgtctcaagctgaaaaagatggtgatagaatttatggtgttattaaaggtgtttctactaatgaagatggttctttgaataaaaattctttgactactccatctactgaatctcaatctaataatattaataatgctatgaaaaaatctactttgtctccaaatgatatttattatattgaagctcatggtactggtactaaagttggtgatccaattgaagttcaatctatttctaatgttttttctaaagatagaaatcaagttgaagatattgaaccattgtttattggttcttttaaatctaatattggtcatttggaatctgctgctggtattgcttctttgattaaagtttgtttgatgttgaaaaatagaattttggttccatctattaattgttctaaattgaatccagctattccatttgataattataaaattaaagttgttagagaagttcaaatgtttccaaataataaaactattaatattggtattaattcttttggttttggtggttctaattgtcatttgattattcaagaatataataaaccaactgatattaaatgtaatactttgattagagattctgataataataataaaaattatttgattccattttctatgaattctaaaatttctttggaaaaatatattaatttgattaaaaataataattatcatgaatatattttttttaaagattttgttaaatatcaaattttgtctaaacaatatactttgtctaatagaatgactattattgctaatgattggcaatctttgattaaatcttctaatgaaacttattctcatcaagaatttagaaatcaaactgttgctattactgatggttctattactgatttggtttcttctaatgaaccaattttggtttatgttttttgtggtcaaggtccacaatggaatggtatgatgaaaactttgtatagaactgaaccagtttttaaaaattctgttgattatattgatcaagttttgtctaaatattttggttattctatttttcaaaaattttcttctatttctgataatgatgattctattaatcatccagttattgctcaaccatctttgtttttgttgcaaattggtttggttgaattgtttaaatattggggtatttttccatctatttctattggtcattcttttggtgaagtttcttcttattatttgtctggtttgatttctttggaaactgtttgtagaattgtttatgttagatctttttatcaaaatcaaactatgggtactggtaaaatgttggtttgttctatttctaatgaacaatggttgtctgaatattctactttgttttctgatttggaaattgcttgtattaattcttctgattctattgttgttactggtaatgaattgagattgaaagaatttgctaatattttgaatgaatctcaaatttttaatacttttttgagatctccatgttcttttcattcttctaaacaagaaattattaaagattctattttttctgaattggttaatgttgaatctaaagaatctactgaaattccattgttttctactgttactggtgaattggttaatgaaccattgtctgctactactatttatgaaaatgttagaaaaccagttttgtttaaaaattctattgaatctttgattaaattttatcatcaacaacaaccatctcaacaaagacaattgatttttattgaaattgctccacatccaactttgggttctttgattaaaaaaactattcaagaatctgttgttccatttaaaactcaaccattgattattgctccattgaatagaaaagaaaatcaagatatttctattaaaaaattgatttctcaattgtattttaatggtattaatattgattttaaatttcaattggatcaagatgaaaatcaagattcttcttttaaagaaactactaattctttgccaagatatcaatgggatgattctgaagaatattgggctgaaccatctcaatctaaaaaaaatagattggaaggtccatcttctactttgttgggttataaaattatttattcttttccagtttatcaaactgttttggatttgcaaaattctaatttttcttatttgttggatcatattgttgctggtaaaccagtttttccaggtgctggttatattgatattattaatcaattttttgttcaaacttctgatattccattgtctaatgaaattatttctattgaatctattcaatttttgcaaccattgatgttgaatcaacataaattgactactttgcaatctttgtttgaaccaactaaaaaatcttctttttctgtttcttttttttctaaagatgaaaaagatgatcaaatttgggttaatacttgtaaagctaaagttactttggaaccaatggaattgtctcaaaatagagttgaagatttggaattgttgaaatctcaatgtaatattactcaattggataaaaaagatttgtatgataaaatttctaaagatttgggtttgttttataatgatgcttttcaaattgttcaatctattcatactggtgttaattgttcttttgctactttgcaaatgccagaatctaatgttactcattcttctattttgaattcttgttttttggataattgttttcatggtttgttgactttgattaatgaaaaaggttcttatgttgttgaatctgttaattctattgctatttttttggaaaatatttctgttgattctgttaattctccattttatttggaaactaaaattattaaatcttctccattttctactgaaggtacttgtagattgtttaataaacaaggtaaattgattttgtctattggtaaatttactattaaatctactaatttgaaaccaaaagttattaatcaattggaaactccattgaatgaaactttttctattgaatggcaatctaaagattctccaattccaccagctaaagaatctccaattaaattggattctttggaattgtttaataaatctactattttgaaagatcaagattttgaaatttattgttcttgtttgatttttaatcaattggttcaatataatccattgtttaaagttttggctactaattttattcaagatcaacaagatgatgctaatgaagaaaattattgtttgtctattatgaaagaattgggtatttctattgattatcaaagatttttttttagaattttgaaaattgttaaattgaatttttctaatttgttgtctaatcaaaaagaaattgatcaattgaaagattctattaaatctaaattttatggtaattctaattctgaagatttggaatttcaatgtattgaaaaagtttctaatattattccaaaattgttgtttgaaaatgataaacaatcttctatgactttgtttgaaaattctttgttgactaaattttatggtcaatctatttctactagattttatttggaatatgttgcttctttggttttggaatctattaaaccaattgttagagaaaaaagagtttttaaaattttggaaattggtgctagaactggttctttgtctaatattgttttggaaaaattgaataaatttttgtctattaattctgataaaaatattattgttgaatataattttactgatatttcttcttcttttattattggtttgcaagaaactatggttactaaatatccaaatatttcttttaaattttctgttttggatttggaaaaagatattaaagatcaagattttttttattctgattatgatattgttttgatggcttatgttattcatgctgtttctaatattacttttgctgttaaacaaatttataatttgttgtctccaagaggttggttgttgtgtattgaaccaaaagctaatattgttttttctgatttggtttttggttgttttggtcaatggtggaattatcaagattctattagaacttctcattgttctttggaatctgaacaatggaaacaagttttgtctgaaaatggttttccaatgaattcttttattggttctttggaatctaattctcattcttttattattcattctcaaaaagaatctattactcaaattaaatcttcttctaaattgtctattgaaaaaatttcttttgttgttaatgaaaatcaaaaattgatggaaccattgttgaatgatgctaatactatttctatgaatccagttgaaattattaaattgaatcaattggatgttgaaaaattgtctatttcttctgttgttttttttatggttggtttggaattgatggaaacttataaagaagaattgtatcaatttattcaattgttgaatcaattgtctttgtctaattttaatggtaaagttgttttggttactaaacaatcttttttgacttctagaaattatttttctagatctttggttgctattgctagatctgctatgaatgaatattctaatttggatattgtttctattgatttggattctaatgattataatttgaattctttgttggttccaattcaatctagattttctgataatgaatttatttataaaaaaggtattttgtttgtttctagattttttaaaaataattctaaattgttgttgtcttctcaatcttttgaaactaatgataataatatgtatcaaactactttgtctgatttgtctattattagaaaagctaaagatgaattgtctaataatgaaattgaaattaaagttaaatctgttggtattaattttaaagataatttgttttataaaggtttgttgccacaagaaatttttagaaaaggtgatattaataatccaccatttggtttggaatgttctggtattatttctagaattggtaatggtgttactgaatttaaagttggtgatcaagtttttggttttgctagacattctttgggttctcatgttattactaataaagatttggttattaaaaaaccagaatctattacttgggatcaagctgcttctattccagttgtttattgtactgcttattattctttgtttaatattgctcatttgaatgataataatgaatctgttttgattcattctgctactggtggtgttggtttggcttctttgaatttgttgaaaatgaaaaaatttgaaaatgtttatgctactgttggttctgaagaaaaaaaacaatatttggaatctaattattcttttattaaatctattttttctactagaactaaagaatattctggtcaattggaaaataaagttgatgttattttgaatactttgtctggtgattttattgaatctaattttaaatctttgaaatcttttggtagattgattgatatttctgttactcatatttatgctaatcaacaaattggtttgggtaattttaaatctgatcatttgtatactgctgttgatttggaaagattgattgatgaaaaaccattgttgttgaaatctattttgtctaaagttactaatgaaattgataatggtaatttggaattgattaaaattaatcaatttaattcttctgaagttaaaactgctgttgaatctttgtctaatagatctcatattggtaaaattgttgtttctaattgtgaaaatatggtttcttcttctgaatctagaattcaaaaaaaaaaatatgatttgaaattggattctactattttgattactggtcaatctggtttgtctattccattgattgaatggttgttgactcattctattgattctgtttctaatgttgttattatttctaaatctccaatgaaatggaaattgcaaaatttggtttttaaatttaaaaatgttaaatttaattatattcaagctgatatttctaattatgatgaaatttatgcttctttgaaatctttgccagatttgccaccaattaaatctgtttttcatttggctgcttgttataatgatgttccaatgaatcaagttactatggatactattgaatctgttcataatccaaaagtttgtggttctattaatttgcatagattgtctatttctttgggttggaatttgtctcattttattttgttttcttctattactggtattactggttatccagatcaatctgtttataattctgctaatattattttggatgctttgtctaatcatagaagagttatgggtttgccatcttttgctattaatttgggtccaatgaaaggtgaaggtaaagtttctgatgttaaagctattaaaaaattgtttaaatctagaggtttgccatctttgtctttgaataaattgtttggtttgttggaagttgttattaataatccattgaaagctgctattccatctcaatttatttgttctccaattgattttaataattatttggatacttttaaaaatatgaatactaaattgtctcatttgtcttctgattctatttctaaagataaagaaaaagaaagagaattgttgtctgattctgtttctattaaagataaagttttggaaaaagtttctgaattgttgtctattccaatttctaaaattaatatggatacttctttgaaaatgtatggtttggattctttgttgtctgttcaatttaaatcttgggttgataatcaatttgaaaaaggtttgattaatcatttggaattgtcttctattactgttaattcttttattgaaaaagttaatactaaatttggtggttcttctgttcaaaaacaaccaattactattgttaaagttattgaaactccaactgctactcaaactactgttccagctattgaattgccacaaaaaccagttaatattaaaactttgtcttgtccattgtctattaaaactccaattttgttgccatctaatgaattgtctgttccattgtttaaatctactgcttcttctccagaattgtctatgactactccaccaattgttaatattagaaatttgaataattctattttggatactccaccattggaatctagaaaaaatcatgttagattgattacttctaatattcatgctccatctcaattgcaaactattcatcaaccaaaacaacaattggcttttaaaactaataataatgcttttattttgggtttgggtaattctgttccaggtgaaccaatttctcaagaaaaattgaaagaatctatttctaatgatttttctaatgatccaaaaactaatgaaaaagttaaaagaatttttgaacaatctcatattaaaactagatatttggttagagattatactaaagaagaaaattctattaaatatagatctaaagaatctattactgatgttaatgaagcttttaaagattgtgttccagatttggctgaaaaagcttgtactaaagctattgctgattggggtggtaataaagaagatattactcatattatgtctgtttcttctactggtgttattattccagatgttaattttaaattgattgataaattgcaattgaatcaagatattgaaagagtttctttgaatatgatgggttgtttggctggtttgtcttctttgagaactgcttcttctttggctaaagcttctccaagaaatagagttttggttgtttgtactgaaatttgttctttgcattttaataatactggtggtggtgatcaaatggttgcttcttctatttttgctgatggtgctgctgcttatattgttggttgttctccaaaaattaatgaaactccattttttgaagttattcaatctattaatagagctactccaaatactgaaaatgctatggtttgggatttgcaaaaagaaggttggaatttgggtttggcttcttctattccacatgttattggtgaaggtattgaaaaatttgttaatgatttgttgtataaagctaaatctcaagtttcttctttgtctccaaaagaatgtgaatttttgattcatactggtggtaaatctattttgatgaatattgaaaatgctttgggtattgatccaaaaatgaataaacatacttgggatatttatcatgcttatggtaatatgtcttctgcttctgttatttttgttttggatcatgctagaaaatctaaaaatttgccaacttattctatttctttggcttttggtccaggtttggcttttgaaggttgtttgttgagaaatttggtttgaacagaagacgggagacactagcacacaactttaccaggcaaggtatttgacgctagcatgtgtccaattcagtgtcatttatgattttttgtagtaggatataaatatatacagcgctccaaatagtgcggttgccccaaaaacaccacggaacctcatctgttctcgtactttgttgtgacaaagtagctcactgccttattatcacattttcattatgcaacgcttcggaaaatacgatgttgaaaatgcctctagagatgaaaaacaatcgtaaaagggtcctgcgtaattgaaacatttgatcagtatgcagtggcacagaaacaaccaggaatactatagtcataggcaatacaaggtatatattggctatgcagacccctccagaaagtaccgacgtcaagttagatacacttaacgaacctagtgcacatttaattgagaaaaatgtggctcttcctaaggacatattccgttcgtacttgagttattggatctatgaaatcgctcgctatacaccagtcatgattttgtcggcgcgccctcgagtaagcttggtaccgcggctagctaagatccgctctaaccgaaaaggaaggagttagacaacctgaagtctaggtccctatttatttttttatagttatgttagtattaagaacgttatttatatttcaaatttttcttttttttctgtacagacgcgtgtacgcatgtaacattatactgaaaaccttgcttgagaaggttttgggacgctcgaagatccagctgcattaatgaatcggccaacgcgcggggagaggcggtttgcgtattgggcgctcttccgcttcctcgctcactgactcgctgcgctcggtcgttcggctgcggcgagcggtatcagctcactcaaaggcggtaatacggttatccacagaatcaggggataacgcaggaaagaacatgtgagcaaaaggccagcaaaaggccaggaaccgtaaaaaggccgcgttgctggcgtttttccataggctccgcccccctgacgagcatcacaaaaatcgacgctcaagtcagaggtggcgaaacccgacaggactataaagataccaggcgtttccccctggaagctccctcgtgcgctctcctgttccgaccctgccgcttaccggatacctgtccgcctttctcccttcgggaagcgtggcgctttctcatagctcacgctgtaggtatctcagttcggtgtaggtcgttcgctccaagctgggctgtgtgcacgaaccccccgttcagcccgaccgctgcgccttatccggtaactatcgtcttgagtccaacccggtaagacacgacttatcgccactggcagcagccactggtaacaggattagcagagcgaggtatgtaggcggtgctacagagttcttgaagtggtggcctaactacggctacactagaaggacagtatttggtatctgcgctctgctgaagccagttaccttcggaaaaagagttggtagctcttgatccggcaaacaaaccaccgctggtagcggtggtttttttgtttgcaagcagcagattacgcgcagaaaaaaaggatctcaagaagatcctttgatcttttctacggggtctgacgctcagtggaacgaaaactcacgttaagggattttggtcatgagattatcaaaaaggatcttcacctagatccttttaaattaaaaatgaagttttaaatcaatctaaagtatatatgagtaaacttggtctgacagttaccaatgcttaatcagtgaggcacctatctcagcgatctgtctatttcgttcatccatagttgcctgactccccgtcgtgtagataactacgatacgggagggcttaccatctggccccagtgctgcaatgataccgcgagacccacgctcaccggctccagatttatcagcaataaaccagccagccggaagggccgagcgcagaagtggtcctgcaactttatccgcctccatccagtctattaattgttgccgggaagctagagtaagtagttcgccagttaatagtttgcgcaacgttgttgccattgctacaggcatcgtggtgtcacgctcgtcgtttggtatggcttcattcagctccggttcccaacgatcaaggcgagttacatgatcccccatgttgtgcaaaaaagcggttagctccttcggtcctccgatcgttgtcagaagtaagttggccgcagtgttatcactcatggttatggcagcactgcataattctcttactgtcatgccatccgtaagatgcttttctgtgactggtgagtactcaaccaagtcattctgagaatagtgtatgcggcgaccgagttgctcttgcccggcgtcaatacgggataataccgcgccacatagcagaactttaaaagtgctcatcattggaaaacgttcttcggggcgaaaactctcaaggatcttaccgctgttgagatccagttcgatgtaacccactcgtgcacccaactgatcttcagcatcttttactttcaccagcgtttctgggtgagcaaaaacaggaaggcaaaatgccgcaaaaaagggaataagggcgacacggaaatgttgaatactcatactcttcctttttcaatattattgaagcatttatcagggttattgtctcatgagcggatacatatttgaatgtatttagaaaaataaacaaataggggttccgcgcacatttccccgaaaagtgccacctgaacgaagcatctgtgcttcattttgtagaacaaaaatgcaacgcgagagcgctaatttttcaaacaaagaatctgagctgcatttttacagaacagaaatgcaacgcgaaagcgctattttaccaacgaagaatctgtgcttcatttttgtaaaacaaaaatgcaacgcgagagcgctaatttttcaaacaaagaatctgagctgcatttttacagaacagaaatgcaacgcgagagcgctattttaccaacaaagaatctatacttcttttttgttctacaaaaatgcatcccgagagcgctatttttctaacaaagcatcttagattactttttttctcctttgtgcgctctataatgcagtctcttgataactttttgcactgtaggtccgttaaggttagaagaaggctactttggtgtctattttctcttccataaaaaaagcctgactccacttcccgcgtttactgattactagcgaagctgcgggtgcattttttcaagataaaggcatccccgattatattctataccgatgtggattgcgcatactttgtgaacagaaagtgatagcgttgatgattcttcattggtcagaaaattatgaacggtttcttctattttgtctctatatactacgtataggaaatgtttacattttcgtattgttttcgattcactctatgaatagttcttactacaatttttttgtctaaagagtaatactagagataaacataaaaaatgtagaggtcgagtttagatgcaagttcaaggagcgaaaggtggatgggtaggttatatagggatatagcacagagatatatagcaaagagatacttttgagcaatgtttgtggaagcggtattcgcaatattttagtagctcgttacagtccggtgcgtttttggttttttgaaagtgcgtcttcagagcgcttttggttttcaaaagcgctctgaagttcctatactttctagagaataggaacttcggaataggaacttcaaagcgtttccgaaaacgagcgcttccgaaaatgcaacgcgagctgcgcacatacagctcactgttcacgtcgcacctatatctgcgtgttgcctgtatatatatatacatgagaagaacggcatagtgcgtgtttatgcttaaatgcgtacttatatgcgtctatttatgtaggatgaaaggtagtctagtacctcctgtgatattatcccattccatgcggggtatcgtatgcttccttcagcactaccctttagctgttctatatgctgccactcctcaattggattagtctcatccttcaatgctatcatttcctttgatattggatcatactaagaaaccattattatcatgacattaacctataaaaataggcgtatcacgaggccctttcgtc

SEQ ID NO: 477 - DNA, 16738 bp, Artificial Sequence
  Plasmid
  exon (3486)..(12566)
sctratcgcgcgtttcggtgatgacggtgaaaacctctgacacatgcagctcccggagacggtcacagcttgtctgtaagcggatgccgggagcagacaagcccgtcagggcgcgtcagcgggtgttggcgggtgtcggggctggcttaactatgcggcatcagagcagattgtactgagagtgcaccataccacagcttttcaattcaattcatcattttttttttattcttttttttgatttcggtttctttgaaatttttttgattcggtaatctccgaacagaaggaagaacgaaggaaggagcacagacttagattggtatatatacgcatatgtagtgttgaagaaacatgaaattgcccagtattcttaacccaactgcacagaacaaaaacctgcaggaaacgaagataaatcatgtcgaaagctacatataaggaacgtgctgctactcatcctagtcctgttgctgccaagctatttaatatcatgcacgaaaagcaaacaaacttgtgtgcttcattggatgttcgtaccaccaaggaattactggagttagttgaagcattaggtcccaaaatttgtttactaaaaacacatgtggatatcttgactgatttttccatggagggcacagttaagccgctaaaggcattatccgccaagtacaattttttactcttcgaagacagaaaatttgctgacattggtaatacagtcaaattgcagtactctgcgggtgtatacagaatagcagaatgggcagacattacgaatgcacacggtgtggtgggcccaggtattgttagcggtttgaagcaggcggcagaagaagtaacaaaggaacctagaggccttttgatgttagcagaattgtcatgcaagggctccctatctactggagaatatactaagggtactgttgacattgcgaagagcgacaaagattttgttatcggctttattgctcaaagagacatgggtggaagagatgaaggttacgattggttgattatgacacccggtgtgggtttagatgacaagggagacgcattgggtcaacagtatagaaccgtggatgatgtggtctctacaggatctgacattattattgttggaagaggactatttgcaaagggaagggatgctaaggtagagggtgaacgttacagaaaagcaggctgggaagcatatttgagaagatgcggccagcaaaactaaaaaactgtattataagtaaatgcatgtatactaaactcacaaattagagcttcaatttaattatatcagttattaccctatgcggtgtgaaataccgcacagatgcgtaaggagaaaataccgcatcaggaaattgtaaacgttaatattttgttaaaattcgcgttaaatttttgttaaatcagctcattttttaaccaataggccgaaatcggcaaaatcccttataaatcaaaagaatagaccgagatagggttgagtgttgttccagtttggaacaagagtccactattaaagaacgtggactccaacgtcaaagggcgaaaaaccgtctatcagggcgatggcccactacgtgaaccatcaccctaatcaagttttttggggtcgaggtgccgtaaagcactaaatcggaaccctaaagggagcccccgatttagagcttgacggggaaagccggcgaacgtggcgagaaaggaagggaagaaagcgaaaggagcgggcgctagggcgctggcaagtgtagcggtcacgctgcgcgtaaccaccacacccgccgcgcttaatgcgccgctacagggcgcgtccattcgccattcaggctgcgcaactgttgggaagggcgatcggtgcgggcctcttcgctattacgccagctgaattggagcgacctcatgctatacctgagaaagcaacctgacctacaggaaagagttactcaagaataagaattttcgttttaaaacctaagagtcactttaaaatttgtatacacttattttttttataacttatttaataataaaaatcataaatcataagaaattcgcttatttagaagtgtcaacaacgtatctaccaacgatttgacccttttccatcttttcgtaaatttctggcaaggtagacaagccgacaaccttgattggagacttgaccaaacctctggcgaagaattgttaattaagagctcagatcttatcgtcgtcatccttgtaatccatcgatactagtgcggccgccctttagtgagggttgaattcgaattttcaaaaattcttactttttttttggatggacgcaaagaagtttaataatcatattacatggcattaccaccatatacatatccatatacatatccatatctaatcttacttatatgttgtggaaatgtaaagagccccattatcttagcctaaaaaaaccttctctttggaactttcagtaatacgcttaactgctcattgctatattgaagtacggattagaagccgccgagcgggtgacagccctccgaaggaagactctcctccgtgcgtcctcgtcttcaccggtcgcgttcctgaaacgcagatgtgcctcgcgccgcactgctccgaacaataaagattctacaatactagcttttatggttatgaagaggaaaaattggcagtaacctggccccacaaaccttcaaatgaacgaatcaaattaacaaccataggatgataatgcgattagttttttagccttatttctggggtaattaatcagcgaagcgatgatttttgatctattaacagatatataaatgcaaaaactgcataaccactttaactaatactttcaacattttcggtttgtattacttcttattcaaatgtaataaaagtatcaacaaaaaattgttaatatacctctatactttaacgtcaaggagaaaaaaccccggatccgtaatacgactcactatagggcccgggggcgcgccaagcaacaggcgcgttggacttttaattttcgaggaccgcgaatccttacatcacacccaatcccccacaagtgatcccccacacaccatagcttcaaaatgtttctactccttttttactcttccagattttctcggactccgcgcatcgccgtaccacttcaaaacacccaagcacagcatactaaatttcccctctttcttcctctagggtgtcgttaattacccgtactaaaggtttggaaaagaaaaaagagaccgcctcgtttctttttcttcgtcgaaaaaggcaataaaaatttttatcacgtttctttttcttgaaaatttttttttttgatttttttctctttcgatgacctcccattgatatttaagttaataaacggtcttcaatttctcaagtttcagtttcatttttcttgttctattacaactttttttacttcttgctcattagaaagaaagcatagcaatctaatctaagttttaataaacaaaacaatgtctttctctgaaaactctccagactctttcttggacttgtctactattattcaagaacaacaacaacaacaagaaaactctgttggtttgactggtgacgttgctattgttggtattggtttgagaatgccaggtggttctaagactccaaacgaattctgggttcaattgttgcaatctttcgacggtgtttctttggtttctaaggaaagatgggctgcttctttctacgaaaaccacattattaacaacaactacggtggtttcttgaacatgaacgaatggaagaagttcgacccattgttcttcggtatttctccaaaggaagctccattgattgacccacaacaaagaatgatgttgactttggcttgggaagctttggaagacgctcaaattccaccattctctttgagaggttctaagattggtgttttcatgggtgtttctaactacgactacatgaagttgcaattcaagggtgctccatctgctgaattgccaccatacactatgactggtactaacggttctattatttctaacagaatttcttactgtttcgacttcagaggtccatctattactattgacactgcttgttcttcttctttggtttctgttaacttgggttgtcaatctattttgtctggtgaatctgaagttgctttgtgtggtggtgttaacgctttgttggacccatctacttctgctgctttctcttctttgggtgttttgaacccagacggtcactgtagagctttcgacgctgacgctaagggttacgttagaggtgaaggtgctggtattgttgttttgaagtctttggctgctgctgaaagagacggtaacagaatttacggtgttattagaggtggttctactaacgaagacggtaagttcaacaagtcttctttgactactccatctatttcttctcaagctgaaaacattagaactactttgaacaaggctgctttgaacccatctgacattttctacgttgaagctcacggtactggtactccagttggtgacccaattgaagttcaagctttgcacgaagttttctctgctaaccactctgttggttacccattgaagattggttctgttaagtctaacattggtcacttggaatctgctgctggtattgcttctttgattaaggtttgtatgatgttgaagaacagattgttggttccaactattaacttcaacaagccaaacccagctattccattcgaagactggaacattgacgttgttaagcaaattgaagacttcccagaacactctgttagaattggtattaactctttcggtttcggtggttctaactgtcacttgattattgaagaataccaatctatttctactgacattgaaaacaagcaaaacgacggtttcagatacttggttccattgtctgctaactctcaacactctttgaacaagtacactgaagacattatttctaacggtgacattcacagaaacgttgacttcaaggaattcgttatgcaccaatctttgaacaagtctcacttgtctcacagaaaggtttacttcgctaaggactggaaggaattcattgaacaaggtgtttctgtttcttctcaattgtctgcttcttctactgacaacaacgactcttctattgactctgttaactcttctaaggttgttttcgttttctgtggtcaaggtccacaatggaagggtatgggttctgaattgtaccaagctgaatctatttacaaggaaactgttgaccacattgactctttgttcaagccattgttcggttactctattttggaaaagttgatttctttgccagacgactctttggaaattcaccacccaattattgctcaaccagctttgttcttgttgcaatgtggtttggtttctttgtacagacaatggggtgttgaaccatctttcgttgttggtcactctttcggtgaagttacttctgcttactgttctggtgctttgactttggaagaagctgttaagattgtttaccacagatcttctttgcaaaacattactattggttctggtaagatgttggctgttactttgacttctgacactttcaacgctgactaccactctaagtacccagaattggaaattgcttgttacaactctttggactctttggttattactggtgttgaagacaagttgcaagaattctctaacgacttgactgctttgggtattttcaacgttttcttgaagtctccatgttctttccactcttctcaccaaaaggttttgaagtctagagttttcgaatctttgactgacttgccatctgttttgcacaacaagattccattgttctctactgttactggttctttgcaaactgacccagttgacgctagatacatttacagaaacttgagacacccagttcaattcaagggtgctattgaatctatttacgacattgcttctgaaccatctgacaacttgattttcttggaaattactccacacccaactttgtcttacttgattaacaagattgttccaaacgctaacgttattccatctttgtacagaaacaaggacgaattggtttctttcaacacttctattgctattttgcactgtaacggttgtaacgttaacttcacttctcaattctctcaccaagaattgtcttctccagtttggagagaaagagttaacttgttgccaagataccaatgggacactgacgtttactggaacgaaccacaatactctattgactgtagattgtctggtccatctggtactattttgggtcaccaagctattcaaggtttgcaaagatacgaatctattattgactgtaacagaagaccattcgaatacttgaaggaccacaaggttaagggtaaggctttgttcccaggtgctggttacattgacgctattattcaagctatgtacccaagacaaatggacattatgatttcttctattgaattccaatctccattcttcttggttgacggtgaacaacaatacttggaaactgttttcgacgaagttactttgaacaacaacaactcttacaaggttcaattcttccaaaaggacggtgaaaagactcaagcttggactaagactgctaacgctagattgtctttgttgcaaccaactaacgacactactagagttgacattgcttctttgatgtctacttgtaagttcactactattggtaagactgacttgtaccaaaagatttctagattgggtttgaactacggtccaactttccaaagagttgaatctattgacattggtccagactgttctatggctaacattccattccacgttaagggtggtccacaccacattttgaacgcttgtttgattgacaactgtttccacggtatgttggctttgttggacaacagacaacacttcgttgttgctcaagctgaaaacgttcacattaacttggaattgttgcaacacttgaactctcaaccagttgacaacttgtacttgtacactaagattttgcacagaggtcaattcgaaattactggttctactcaattgttgactccatctggtcaaaacttgttgtctatgaagagattcactgttaagactttggacaagaaccactctgaccaaattaagttcccatgtgacaacgttttcactatgaactggcaaactaaggaatctccattgccatctccattctctattgttccagaaaagttgccacaacaagctgctgaatctcaaattttgatggacttccaattcgttttgtactgtgctaagttggttaaccaatctttgtctaagtacttgttgggttacaacttgttgaagttcattgctactccaattccagaattgttgactcaataccaaattcactctaagttcactagattcttgactagattgcaatctattttgattgacaacagaattgacttggacccaaacggtgaattggacgctgacatgtctattcaaaaggctatgattttggacagatacccaaaggctttggttgaattcgaattggttgaaagagctgctaacttgattccagctttgttgactggtgactcttctgcttgtcactctttgttcgaaaacgacttgttgtctaagttctacactcactcttcttctgttacttactacttggaacaattggctgacactattcaacacgctattacttctaagttgtctgaaccaagagttttcagaattttggaaattggtggtggtactggttctttgacttacagattgttgaacactttcaacttgattttgggtggtccaaagcaaagaattgaaattgaatacactttcactgacgtttctgctggtttcgttactactatgaacgaagaaattgaaaagtctgctaagttgccacacaacttctctatgaagttcaagactttggacttggaaagagacgttgttgctcaaggtttcttgccaggttcttacgacatggttttgatgtcttacgttgttcacgctgtttctaacttgccatacgctttggaacaattgaaccacattacttctccatctggttggttgttgttcattgaaccatctaagaacattattttctctgacattgttttcggttgtttccaccaatggtggcaatactctgacaaccaaagatctgaccactgttctttggctccagaacaatggtctaagttgttgcacaaggaaggtttcccacaaactattactatttctccaccaaacgctatgggtcaaatgggtgcttctcactctttcgttgttttgtctcaaaagttgccaatgaacactgaacacttggaagacgacattcaaaagatttctttgattgtttctaagactcaagttcacccaactaacccaactagaaagttgcacaagttgttgagagaagcttctgtttctgctcacgaagttgaaattattgaatctcaaaacattgaaacttctatggacagaattaagggttctaactacttgttctacttccacggtttggaaactttgtctggtaactacaagttggttactcaagaattggttactttgattcaaaagttggctactattccagttggttctgctccaaagttggctattgttactaagaactcttgtactttgaactctagaaactacttgaacgcttctttgattggtattgctagaactgctgctaacgaatacccaactttgtctattactatgattgacattgacgacgaagacactactgacatgaagactttgattaacttgactggtaagtctgacaagttggctgactctgaattcattattaagggtggtaagattttggttccaagattgactccagttccaagagacactttgttggaatcttctggtgcttacgaaaagaacattaacaacgttgcttgtttgtctgacgctaagttgggtttccactgtgttactagatctccattgggttcttctgaaattgaaatttctgttaaggctgttggtttgaacttcaaggactacttgttcatgagaggtttgttgccacaagaaattttcagaaagggtgacatttacaacccaccattcggtttggaatgttctggtattatttctagaattggtgaacaagttgaccaattctctgttggtgacgaagttgttggtttcgctagacactctttgggttctcacgttgttactaaccaaaacttggttgttatgaagccatctatgttgtcttacgaagaagctgcttctattccagttgtttactgtactgctttctactctttgttcaacgttgctaagttggacactagacacgaatctgttttgattcacggtgctactggtggtgttggtatggctgctttgaacttgttgaagatgaagtctgctttgagagttttcgctactgctggttctactgaaaagcaagaattgttgaaggaaagattcggtgaaatgttgtgtggtgtttacaactctagaactaaggaattcgctgacagaattaaggaaacttcttctggtgttaacgttttgttgaacactttgtctggtgaattcatgaacgctaacttcgaatctttggcttctttcggtagaattgctgacttgtctgttactcacatttacgctaacgaaccattggacatgtctaacttcaagagagacacttcttactctgctgttgacttggaaagattgattgacgaaagaccacaattgttgcaatctatgttgtctgaaattatggacaacatttcttctggttctttggaaattattccaattaacgtttactctgcttctaagtctagagctgctgttgaatctatgtctgaaagaaagcacattggtaagattgttattgactgtaagtctattgacaaggacattttgattccattgttcaagtctccaactttggttccaattccaaactacaagttggacatttctaacactgttattattactggtcaaactggtatttctttggaattgattaagtggttggctaacagatctaacgcttctgacattgttgttatttctagatcttctttgggttggaagttggaaactttgattaagagattgcaattgaacagatctaagccagctattcaccacattcaagttgacattgctaacatggactctttgacttcttctgttcaaaagttggaagttccaccaattcaagctgttttccacttggctgctatttactacgacgttccattcgaccaagttaacattgacgttattaacaaggttcacgacccaaaggttattggtgctattaacttgcacagattgtctattatttctggttggaagttggactacttcgttttgttctcttctattacttctattactggttacaacggtcaagcttcttacaactcttctaacgctgttttggacgctttgtgtaacttcagaatttctgctggtttgccatctttgtctttcaactggggtccattgcaatctgaaggtaaggttgctgacaacgaagctattgaagaattgttcttgaacagaggtttgccatctttgtctttgccaagattcttcggtgctttggaatgtgctttgtctggtaacgaatcttgtcacccaccaagacaattgattgtttctccaattaacgctcaattgtacttcgactctttcccacacatgagaccaaagatggctcacttggttgttattaacgaaaacgacaacagattggacaacggtaaggacgacatttctttggaagaaagaattactaacaaggttgctaacttgttgtctgttaaccactctaagttgaacccagacactaagttgaaggaatacggtttggactctttgttgactgttcaattcaagtcttggattgacaaggaatacgaaaagaacttgttcactcacattcaattgtcttcttcttctattaagaacattattcaaaagattgctaacttggctactggtacttctaagggtactactactgctttgttgtctgcttctgaagacacttctaaggctaagttcaaggttgacgttagaacttctccattgccaaagttgtcttacgttttgccaagaaagtcttctgttccaaacattgaattgccatctttgttgccaattactaaggaaaagtcttctttgcacaactctactaacaacttgccacaatacaacaagttgcaatcttctccagttccatcttctaagactaacccattgttgagaactgttcacgctaagtctttgattaacaacggtgacagaattacttctaacactactggttctaactcttctggtagaggtactccattgtcttctccaacttcttcttctccaactagatctttgtctccaatgttgtctttggttatgccaactatttctaacaacattaacccatacattttgggtatgggtactgctgttccaaacggtccattgtaccaagacgacttgggtgctactatgtctaaggacttctctgacgacccagaaactgttgacaaggttgttaagattttcgaacaatctcacattaagactagacacttgttcagaaacccattgttgccagaaacttctttgaagcaaagaaagaacgaaaacatttctgacgttaacggtcaattcattaaggctgctccatctttgtctagagaatcttgtgaaaaggctattaaggactggggtggtaacgttgaagacattactcacattgtttctgtttcttctactggtgttgttgttccagacattaacttcttgttgattgaaaagttgggtttgaacagagacgttgaaagagtttctattaacttcatgggttgtttggctggtttgtcttctttgagagctgcttgttctttggcttgtcacaacgctaagaacagaattttggttgtttgtactgaaatttgttctactcacttcactactaacgaaggtgttgaccaaattgttgcttctactattttcgctgacggttctgctgcttacattttgggttgtaacccatctatttacgaaagaccattgttcgaagttttgacttctatgaacagatctgttccaggtactgctcacactatgacttgggaaatttctactaacggttgggacttgggtttggaccaatctattccacaccacattggtggtggtattgaaactttcgttagagaattgttggaaaagactaaggctcaaactcactctactaacttcaaggactacgaattcttgattcacactggtggtaaggctattttgatgtctattgaaaactctttggacattgtttctactcaaaactctcactcttggtctatttacaaggctttcggtaacatgtcttctgcttctgttttgttcgttatggaccacgctagaaagtctaagtctttgccacaatactctattggtttggctttcggtccaggtttggctttcgaaggttgtgttttgagaaacatttgttgaacagaagacgggagacactagcacacaactttaccaggcaaggtatttgacgctagcatgtgtccaattcagtgtcatttatgattttttgtagtaggatataaatatatacagcgctccaaatagtgcggttgccccaaaaacaccacggaacctcatctgttctcgtactttgttgtgacaaagtagctcactgccttattatcacattttcattatgcaacgcttcggaaaatacgatgttgaaaatgcctctagagatgaaaaacaatcgtaaaagggtcctgcgtaattgaaacatttgatcagtatgcagtggcacagaaacaaccaggaatactatagtcataggcaatacaaggtatatattggctatgcagacccctccagaaagtaccgacgtcaagttagatacacttaacgaacctagtgcacatttaattgagaaaaatgtggctcttcctaaggacatattccgttcgtacttgagttattggatctatgaaatcgctcgctatacaccagtcatgattttgtcggcgcgccctcgagtaagcttggtaccgcggctagctaagatccgctctaaccgaaaaggaaggagttagacaacctgaagtctaggtccctatttatttttttatagttatgttagtattaagaacgttatttatatttcaaatttttcttttttttctgtacagacgcgtgtacgcatgtaacattatactgaaaaccttgcttgagaaggttttgggacgctcgaagatccagctgcattaatgaatcggccaacgcgcggggagaggcggtttgcgtattgggcgctcttccgcttcctcgctcactgactcgctgcgctcggtcgttcggctgcggcgagcggtatcagctcactcaaaggcggtaatacggttatccacagaatcaggggataacgcaggaaagaacatgtgagcaaaaggccagcaaaaggccaggaaccgtaaaaaggccgcgttgctggcgtttttccataggctccgcccccctgacgagcatcacaaaaatcgacgctcaagtcagaggtggcgaaacccgacaggactataaagataccaggcgtttccccctggaagctccctcgtgcgctctcctgttccgaccctgccgcttaccggatacctgtccgcctttctcccttcgggaagcgtggcgctttctcatagctcacgctgtaggtatctcagttcggtgtaggtcgttcgctccaagctgggctgtgtgcacgaaccccccgttcagcccgaccgctgcgccttatccggtaactatcgtcttgagtccaacccggtaagacacgacttatcgccactggcagcagccactggtaacaggattagcagagcgaggtatgtaggcggtgctacagagttcttgaagtggtggcctaactacggctacactagaaggacagtatttggtatctgcgctctgctgaagccagttaccttcggaaaaagagttggtagctcttgatccggcaaacaaaccaccgctggtagcggtggtttttttgtttgcaagcagcagattacgcgcagaaaaaaaggatctcaagaagatcctttgatcttttctacggggtctgacgctcagtggaacgaaaactcacgttaagggattttggtcatgagattatcaaaaaggatcttcacctagatccttttaaattaaaaatgaagttttaaatcaatctaaagtatatatgagtaaacttggtctgacagttaccaatgcttaatcagtgaggcacctatctcagcgatctgtctatttcgttcatccatagttgcctgactccccgtcgtgtagataactacgatacgggagggcttaccatctggccccagtgctgcaatgataccgcgagacccacgctcaccggctccagatttatcagcaataaaccagccagccggaagggccgagcgcagaagtggtcctgcaactttatccgcctccatccagtctattaattgttgccgggaagctagagtaagtagttcgccagttaatagtttgcgcaacgttgttgccattgctacaggcatcgtggtgtcacgctcgtcgtttggtatggcttcattcagctccggttcccaacgatcaaggcgagttacatgatcccccatgttgtgcaaaaaagcggttagctccttcggtcctccgatcgttgtcagaagtaagttggccgcagtgttatcactcatggttatggcagcactgcataattctcttactgtcatgccatccgtaagatgcttttctgtgactggtgagtactcaaccaagtcattctgagaatagtgtatgcggcgaccgagttgctcttgcccggcgtcaatacgggataataccgcgccacatagcagaactttaaaagtgctcatcattggaaaacgttcttcggggcgaaaactctcaaggatcttaccgctgttgagatccagttcgatgtaacccactcgtgcacccaactgatcttcagcatcttttactttcaccagcgtttctgggtgagcaaaaacaggaaggcaaaatgccgcaaaaaagggaataagggcgacacggaaatgttgaatactcatactcttcctttttcaatattattgaagcatttatcagggttattgtctcatgagcggatacatatttgaatgtatttagaaaaataaacaaataggggttccgcgcacatttccccgaaaagtgccacctgaacgaagcatctgtgcttcattttgtagaacaaaaatgcaacgcgagagcgctaatttttcaaacaaagaatctgagctgcatttttacagaacagaaatgcaacgcgaaagcgctattttaccaacgaagaatctgtgcttcatttttgtaaaacaaaaatgcaacgcgagagcgctaatttttcaaacaaagaatctgagctgcatttttacagaacagaaatgcaacgcgagagcgctattttaccaacaaagaatctatacttcttttttgttctacaaaaatgcatcccgagagcgctatttttctaacaaagcatcttagattactttttttctcctttgtgcgctctataatgcagtctcttgataactttttgcactgtaggtccgttaaggttagaagaaggctactttggtgtctattttctcttccataaaaaaagcctgactccacttcccgcgtttactgattactagcgaagctgcgggtgcattttttcaagataaaggcatccccgattatattctataccgatgtggattgcgcatactttgtgaacagaaagtgatagcgttgatgattcttcattggtcagaaaattatgaacggtttcttctattttgtctctatatactacgtataggaaatgtttacattttcgtattgttttcgattcactctatgaatagttcttactacaatttttttgtctaaagagtaatactagagataaacataaaaaatgtagaggtcgagtttagatgcaagttcaaggagcgaaaggtggatgggtaggttatatagggatatagcacagagatatatagcaaagagatacttttgagcaatgtttgtggaagcggtattcgcaatattttagtagctcgttacagtccggtgcgtttttggttttttgaaagtgcgtcttcagagcgcttttggttttcaaaagcgctctgaagttcctatactttctagagaataggaacttcggaataggaacttcaaagcgtttccgaaaacgagcgcttccgaaaatgcaacgcgagctgcgcacatacagctcactgttcacgtcgcacctatatctgcgtgttgcctgtatatatatatacatgagaagaacggcatagtgcgtgtttatgcttaaatgcgtacttatatgcgtctatttatgtaggatgaaaggtagtctagtacctcctgtgatattatcccattccatgcggggtatcgtatgcttccttcagcactaccctttagctgttctatatgctgccactcctcaattggattagtctcatccttcaatgctatcatttcctttgatattggatcatactaagaaaccattattatcatgacattaacctataaaaataggcgtatcacgaggccctttcgtc

SEQ ID NO: 478 - DNA, 16738 bp, Artificial Sequence
  Plasmid
  exon (3486)..(12566)
sctratcgcgcgtttcggtgatgacggtgaaaacctctgacacatgcagctcccggagacggtcacagcttgtctgtaagcggatgccgggagcagacaagcccgtcagggcgcgtcagcgggtgttggcgggtgtcggggctggcttaactatgcggcatcagagcagattgtactgagagtgcaccataccacagcttttcaattcaattcatcattttttttttattcttttttttgatttcggtttctttgaaatttttttgattcggtaatctccgaacagaaggaagaacgaaggaaggagcacagacttagattggtatatatacgcatatgtagtgttgaagaaacatgaaattgcccagtattcttaacccaactgcacagaacaaaaacctgcaggaaacgaagataaatcatgtcgaaagctacatataaggaacgtgctgctactcatcctagtcctgttgctgccaagctatttaatatcatgcacgaaaagcaaacaaacttgtgtgcttcattggatgttcgtaccaccaaggaattactggagttagttgaagcattaggtcccaaaatttgtttactaaaaacacatgtggatatcttgactgatttttccatggagggcacagttaagccgctaaaggcattatccgccaagtacaattttttactcttcgaagacagaaaatttgctgacattggtaatacagtcaaattgcagtactctgcgggtgtatacagaatagcagaatgggcagacattacgaatgcacacggtgtggtgggcccaggtattgttagcggtttgaagcaggcggcagaagaagtaacaaaggaacctagaggccttttgatgttagcagaattgtcatgcaagggctccctatctactggagaatatactaagggtactgttgacattgcgaagagcgacaaagattttgttatcggctttattgctcaaagagacatgggtggaagagatgaaggttacgattggttgattatgacacccggtgtgggtttagatgacaagggagacgcattgggtcaacagtatagaaccgtggatgatgtggtctctacaggatctgacattattattgttggaagaggactatttgcaaagggaagggatgctaaggtagagggtgaacgttacagaaaagcaggctgggaagcatatttgagaagatgcggccagcaaaactaaaaaactgtattataagtaaatgcatgtatactaaactcacaaattagagcttcaatttaattatatcagttattaccctatgcggtgtgaaataccgcacagatgcgtaaggagaaaataccgcatcaggaaattgtaaacgttaatattttgttaaaattcgcgttaaatttttgttaaatcagctcattttttaaccaataggccgaaatcggcaaaatcccttataaatcaaaagaatagaccgagatagggttgagtgttgttccagtttggaacaagagtccactattaaagaacgtggactccaacgtcaaagggcgaaaaaccgtctatcagggcgatggcccactacgtgaaccatcaccctaatcaagttttttggggtcgaggtgccgtaaagcactaaatcggaaccctaaagggagcccccgatttagagcttgacggggaaagccggcgaacgtggcgagaaaggaagggaagaaagcgaaaggagcgggcgctagggcgctggcaagtgtagcggtcacgctgcgcgtaaccaccacacccgccgcgcttaatgcgccgctacagggcgcgtccattcgccattcaggctgcgcaactgttgggaagggcgatcggtgcgggcctcttcgctattacgccagctgaattggagcgacctcatgctatacctgagaaagcaacctgacctacaggaaagagttactcaagaataagaattttcgttttaaaacctaagagtcactttaaaatttgtatacacttattttttttataacttatttaataataaaaatcataaatcataagaaattcgcttatttagaagtgtcaacaacgtatctaccaacgatttgacccttttccatcttttcgtaaatttctggcaaggtagacaagccgacaaccttgattggagacttgaccaaacctctggcgaagaattgttaattaagagctcagatcttatcgtcgtcatccttgtaatccatcgatactagtgcggccgccctttagtgagggttgaattcgaattttcaaaaattcttactttttttttggatggacgcaaagaagtttaataatcatattacatggcattaccaccatatacatatccatatacatatccatatctaatcttacttatatgttgtggaaatgtaaagagccccattatcttagcctaaaaaaaccttctctttggaactttcagtaatacgcttaactgctcattgctatattgaagtacggattagaagccgccgagcgggtgacagccctccgaaggaagactctcctccgtgcgtcctcgtcttcaccggtcgcgttcctgaaacgcagatgtgcctcgcgccgcactgctccgaacaataaagattctacaatactagcttttatggttatgaagaggaaaaattggcagtaacctggccccacaaaccttcaaatgaacgaatcaaattaacaaccataggatgataatgcgattagttttttagccttatttctggggtaattaatcagcgaagcgatgatttttgatctattaacagatatataaatgcaaaaactgcataaccactttaactaatactttcaacattttcggtttgtattacttcttattcaaatgtaataaaagtatcaacaaaaaattgttaatatacctctatactttaacgtcaaggagaaaaaaccccggatccgtaatacgactcactatagggcccgggggcgcgccaagcaacaggcgcgttggacttttaattttcgaggaccgcgaatccttacatcacacccaatcccccacaagtgatcccccacacaccatagcttcaaaatgtttctactccttttttactcttccagattttctcggactccgcgcatcgccgtaccacttcaaaacacccaagcacagcatactaaatttcccctctttcttcctctagggtgtcgttaattacccgtactaaaggtttggaaaagaaaaaagagaccgcctcgtttctttttcttcgtcgaaaaaggcaataaaaatttttatcacgtttctttttcttgaaaatttttttttttgatttttttctctttcgatgacctcccattgatatttaagttaataaacggtcttcaatttctcaagtttcagtttcatttttcttgttctattacaactttttttacttcttgctcattagaaagaaagcatagcaatctaatctaagttttaataaacaaaacaatgtctttctctgaaaactctccagactctttcttggacttgtctactattattcaagaacaacaacaacaacaagaaaactctgttggtttgactggtgacgttgctattgttggtattggtttgagaatgccaggtggttctaagactccaaacgaattctgggttcaattgttgcaatctttcgacggtgtttctttggtttctaaggaaagatgggctgcttctttctacgaaaaccacattattaacaacaactacggtggtttcttgaacatgaacgaatggaagaagttcgacccattgttcttcggtatttctccaaaggaagctccattgattgacccacaacaaagaatgatgttgactttggcttgggaagctttggaagacgctcaaattccaccattctctttgagaggttctaagattggtgttttcatgggtgtttctaactacgactacatgaagttgcaattcaagggtgctccatctgctgaattgccaccatacactatgactggtactaacggttctattatttctaacagaatttcttactgtttcgacttcagaggtccatctattactattgacactgcttgttcttcttctttggtttctgttaacttgggttgtcaatctattttgtctggtgaatctgaagttgctttgtgtggtggtgttaacgctttgttggacccatctacttctgctgctttctcttctttgggtgttttgaacccagacggtcactgtagagctttcgacgctgacgctaagggttacgttagaggtgaaggtgctggtattgttgttttgaagtctttggctgctgctgaaagagacggtaacagaatttacggtgttattagaggtggttctactaacgaagacggtaagttcaacaagtcttctttgactactccatctatttcttctcaagctgaaaacattagaactactttgaacaaggctgctttgaacccatctgacattttctacgttgaagctcacggtactggtactccagttggtgacccaattgaagttcaagctttgcacgaagttttctctgctaaccactctgttggttacccattgaagattggttctgttaagtctaacattggtcacttggaatctgctgctggtattgcttctttgattaaggtttgtatgatgttgaagaacagattgttggttccaactattaacttcaacaagccaaacccagctattccattcgaagactggaacattgacgttgttaagcaaattgaagacttcccagaacactctgttagaattggtattaactctttcggtttcggtggttctaactgtcacttgattattgaagaataccaatctatttctactgacattgaaaacaagcaaaacgacggtttcagatacttggttccattgtctgctaactctcaacactctttgaacaagtacactgaagacattatttctaacggtgacattcacagaaacgttgacttcaaggaattcgttatgcaccaatctttgaacaagtctcacttgtctcacagaaaggtttacttcgctaaggactggaaggaattcattgaacaaggtgtttctgtttcttctcaattgtctgcttcttctactgacaacaacgactcttctattgactctgttaactcttctaaggttgttttcgttttctgtggtcaaggtccacaatggaagggtatgggttctgaattgtaccaagctgaatctatttacaaggaaactgttgaccacattgactctttgttcaagccattgttcggttactctattttggaaaagttgatttctttgccagacgactctttggaaattcaccacccaattattgctcaaccagctttgttcttgttgcaatgtggtttggtttctttgtacagacaatggggtgttgaaccatctttcgttgttggtcactctttcggtgaagttacttctgcttactgttctggtgctttgactttggaagaagctgttaagattgtttaccacagatcttctttgcaaaacattactattggttctggtaagatgttggctgttactttgacttctgacactttcaacgctgactaccactctaagtacccagaattggaaattgcttgttacaactctttggactctttggttattactggtgttgaagacaagttgcaagaattctctaacgacttgactgctttgggtattttcaacgttttcttgaagtctccatgttctttccactcttctcaccaaaaggttttgaagtctagagttttcgaatctttgactgacttgccatctgttttgcacaacaagattccattgttctctactgttactggttctttgcaaactgacccagttgacgctagatacatttacagaaacttgagacacccagttcaattcaagggtgctattgaatctatttacgacattgcttctgaaccatctgacaacttgattttcttggaaattactccacacccaactttgtcttacttgattaacaagattgttccaaacgctaacgttattccatctttgtacagaaacaaggacgaattggtttctttcaacacttctattgctattttgcactgtaacggttgtaacgttaacttcacttctcaattctctcaccaagaattgtcttctccagtttggagagaaagagttaacttgttgccaagataccaatgggacactgacgtttactggaacgaaccacaatactctattgactgtagattgtctggtccatctggtactattttgggtcaccaagctattcaaggtttgcaaagatacgaatctattattgactgtaacagaagaccattcgaatacttgaaggaccacaaggttaagggtaaggctttgttcccaggtgctggttacattgacgctattattcaagctatgtacccaagacaaatggacattatgatttcttctattgaattccaatctccattcttcttggttgacggtgaacaacaatacttggaaactgttttcgacgaagttactttgaacaacaacaactcttacaaggttcaattcttccaaaaggacggtgaaaagactcaagcttggactaagactgctaacgctagattgtctttgttgcaaccaactaacgacactactagagttgacattgcttctttgatgtctacttgtaagttcactactattggtaagactgacttgtaccaaaagatttctagattgggtttgaactacggtccaactttccaaagagttgaatctattgacattggtccagactgttctatggctaacattccattccacgttaagggtggtccacaccacattttgaacgcttgtttgattgacaactgtttccacggtatgttggctttgttggacaacagacaacacttcgttgttgctcaagctgaaaacgttcacattaacttggaattgttgcaacacttgaactctcaaccagttgacaacttgtacttgtacactaagattttgcacagaggtcaattcgaaattactggttctactcaattgttgactccatctggtcaaaacttgttgtctatgaagagattcactgttaagactttggacaagaaccactctgaccaaattaagttcccatgtgacaacgttttcactatgaactggcaaactaaggaatctccattgccatctccattctctattgttccagaaaagttgccacaacaagctgctgaatctcaaattttgatggacttccaattcgttttgtactgtgctaagttggttaaccaatctttgtctaagtacttgttgggttacaacttgttgaagttcattgctactccaattccagaattgttgactcaataccaaattcactctaagttcactagattcttgactagattgcaatctattttgattgacaacagaattgacttggacccaaacggtgaattggacgctgacatgtctattcaaaaggctatgattttggacagatacccaaaggctttggttgaattcgaattggttgaaagagctgctaacttgattccagctttgttgactggtgactcttctgcttgtcactctttgttcgaaaacgacttgttgtctaagttctacactcactcttcttctgttacttactacttggaacaattggctgacactattcaacacgctattacttctaagttgtctgaaccaagagttttcagaattttggaaattggtggtagaactggttctttgacttacagattgttgaacactttcaacttgattttgggtggtccaaagcaaagaattgaaattgaatacactttcactgacgtttctgctggtttcgttactactatgaacgaagaaattgaaaagtctgctaagttgccacacaacttctctatgaagttcaagactttggacttggaaagagacgttgttgctcaaggtttcttgccaggttcttacgacatggttttgatgtcttacgttgttcacgctgtttctaacttgccatacgctttggaacaattgaaccacattacttctccatctggttggttgttgttcattgaaccatctaagaacattattttctctgacattgttttcggttgtttccaccaatggtggcaatactctgacaaccaaagatctgaccactgttctttggctccagaacaatggtctaagttgttgcacaaggaaggtttcccacaaactattactatttctccaccaaacgctatgggtcaaatgggtgcttctcactctttcgttgttttgtctcaaaagttgccaatgaacactgaacacttggaagacgacattcaaaagatttctttgattgtttctaagactcaagttcacccaactaacccaactagaaagttgcacaagttgttgagagaagcttctgtttctgctcacgaagttgaaattattgaatctcaaaacattgaaacttctatggacagaattaagggttctaactacttgttctacttccacggtttggaaactttgtctggtaactacaagttggttactcaagaattggttactttgattcaaaagttggctactattccagttggttctgctccaaagttggctattgttactaagaactcttgtactttgaactctagaaactacttgaacgcttctttgattggtattgctagaactgctgctaacgaatacccaactttgtctattactatgattgacattgacgacgaagacactactgacatgaagactttgattaacttgactggtaagtctgacaagttggctgactctgaattcattattaagggtggtaagattttggttccaagattgactccagttccaagagacactttgttggaatcttctggtgcttacgaaaagaacattaacaacgttgcttgtttgtctgacgctaagttgggtttccactgtgttactagatctccattgggttcttctgaaattgaaatttctgttaaggctgttggtttgaacttcaaggactacttgttcatgagaggtttgttgccacaagaaattttcagaaagggtgacatttacaacccaccattcggtttggaatgttctggtattatttctagaattggtgaacaagttgaccaattctctgttggtgacgaagttgttggtttcgctagacactctttgggttctcacgttgttactaaccaaaacttggttgttatgaagccatctatgttgtcttacgaagaagctgcttctattccagttgtttactgtactgctttctactctttgttcaacgttgctaagttggacactagacacgaatctgttttgattcacggtgctactggtggtgttggtatggctgctttgaacttgttgaagatgaagtctgctttgagagttttcgctactgctggttctactgaaaagcaagaattgttgaaggaaagattcggtgaaatgttgtgtggtgtttacaactctagaactaaggaattcgctgacagaattaaggaaacttcttctggtgttaacgttttgttgaacactttgtctggtgaattcatgaacgctaacttcgaatctttggcttctttcggtagaattgctgacttgtctgttactcacatttacgctaacgaaccattggacatgtctaacttcaagagagacacttcttactctgctgttgacttggaaagattgattgacgaaagaccacaattgttgcaatctatgttgtctgaaattatggacaacatttcttctggttctttggaaattattccaattaacgtttactctgcttctaagtctagagctgctgttgaatctatgtctgaaagaaagcacattggtaagattgttattgactgtaagtctattgacaaggacattttgattccattgttcaagtctccaactttggttccaattccaaactacaagttggacatttctaacactgttattattactggtcaaactggtatttctttggaattgattaagtggttggctaacagatctaacgcttctgacattgttgttatttctagatcttctttgggttggaagttggaaactttgattaagagattgcaattgaacagatctaagccagctattcaccacattcaagttgacattgctaacatggactctttgacttcttctgttcaaaagttggaagttccaccaattcaagctgttttccacttggctgctatttactacgacgttccattcgaccaagttaacattgacgttattaacaaggttcacgacccaaaggttattggtgctattaacttgcacagattgtctattatttctggttggaagttggactacttcgttttgttctcttctattacttctattactggttacaacggtcaagcttcttacaactcttctaacgctgttttggacgctttgtgtaacttcagaatttctgctggtttgccatctttgtctttcaactggggtccattgcaatctgaaggtaaggttgctgacaacgaagctattgaagaattgttcttgaacagaggtttgccatctttgtctttgccaagattcttcggtgctttggaatgtgctttgtctggtaacgaatcttgtcacccaccaagacaattgattgtttctccaattaacgctcaattgtacttcgactctttcccacacatgagaccaaagatggctcacttggttgttattaacgaaaacgacaacagattggacaacggtaaggacgacatttctttggaagaaagaattactaacaaggttgctaacttgttgtctgttaaccactctaagttgaacccagacactaagttgaaggaatacggtttggactctttgttgactgttcaattcaagtcttggattgacaaggaatacgaaaagaacttgttcactcacattcaattgtcttcttcttctattaagaacattattcaaaagattgctaacttggctactggtacttctaagggtactactactgctttgttgtctgcttctgaagacacttctaaggctaagttcaaggttgacgttagaacttctccattgccaaagttgtcttacgttttgccaagaaagtcttctgttccaaacattgaattgccatctttgttgccaattactaaggaaaagtcttctttgcacaactctactaacaacttgccacaatacaacaagttgcaatcttctccagttccatcttctaagactaacccattgttgagaactgttcacgctaagtctttgattaacaacggtgacagaattacttctaacactactggttctaactcttctggtagaggtactccattgtcttctccaacttcttcttctccaactagatctttgtctccaatgttgtctttggttatgccaactatttctaacaacattaacccatacattttgggtatgggtactgctgttccaaacggtccattgtaccaagacgacttgggtgctactatgtctaaggacttctctgacgacccagaaactgttgacaaggttgttaagattttcgaacaatctcacattaagactagacacttgttcagaaacccattgttgccagaaacttctttgaagcaaagaaagaacgaaaacatttctgacgttaacggtcaattcattaaggctgctccatctttgtctagagaatcttgtgaaaaggctattaaggactggggtggtaacgttgaagacattactcacattgtttctgtttcttctactggtgttgttgttccagacattaacttcttgttgattgaaaagttgggtttgaacagagacgttgaaagagtttctattaacttcatgggttgtttggctggtttgtcttctttgagagctgcttgttctttggcttgtcacaacgctaagaacagaattttggttgtttgtactgaaatttgttctactcacttcactactaacgaaggtgttgaccaaattgttgcttctactattttcgctgacggttctgctgcttacattttgggttgtaacccatctatttacgaaagaccattgttcgaagttttgacttctatgaacagatctgttccaggtactgctcacactatgacttgggaaatttctactaacggttgggacttgggtttggaccaatctattccacaccacattggtggtggtattgaaactttcgttagagaattgttggaaaagactaaggctcaaactcactctactaacttcaaggactacgaattcttgattcacactggtggtaaggctattttgatgtctattgaaaactctttggacattgtttctactcaaaactctcactcttggtctatttacaaggctttcggtaacatgtcttctgcttctgttttgttcgttatggaccacgctagaaagtctaagtctttgccacaatactctattggtttggctttcggtccaggtttggctttcgaaggttgtgttttgagaaacatttgttgaacagaagacgggagacactagcacacaactttaccaggcaaggtatttgacgctagcatgtgtccaattcagtgtcatttatgattttttgtagtaggatataaatatatacagcgctccaaatagtgcggttgccccaaaaacaccacggaacctcatctgttctcgtactttgttgtgacaaagtagctcactgccttattatcacattttcattatgcaacgcttcggaaaatacgatgttgaaaatgcctctagagatgaaaaacaatcgtaaaagggtcctgcgtaattgaaacatttgatcagtatgcagtggcacagaaacaaccaggaatactatagtcataggcaatacaaggtatatattggctatgcagacccctccagaaagtaccgacgtcaagttagatacacttaacgaacctagtgcacatttaattgagaaaaatgtggctcttcctaaggacatattccgttcgtacttgagttattggatctatgaaatcgctcgctatacaccagtcatgattttgtcggcgcgccctcgagtaagcttggtaccgcggctagctaagatccgctctaaccgaaaaggaaggagttagacaacctgaagtctaggtccctatttatttttttatagttatgttagtattaagaacgttatttatatttcaaatttttcttttttttctgtacagacgcgtgtacgcatgtaacattatactgaaaaccttgcttgagaaggttttgggacgctcgaagatccagctgcattaatgaatcggccaacgcgcggggagaggcggtttgcgtattgggcgctcttccgcttcctcgctcactgactcgctgcgctcggtcgttcggctgcggcgagcggtatcagctcactcaaaggcggtaatacggttatccacagaatcaggggataacgcaggaaagaacatgtgagcaaaaggccagcaaaaggccaggaaccgtaaaaaggccgcgttgctggcgtttttccataggctccgcccccctgacgagcatcacaaaaatcgacgctcaagtcagaggtggcgaaacccgacaggactataaagataccaggcgtttccccctggaagctccctcgtgcgctctcctgttccgaccctgccgcttaccggatacctgtccgcctttctcccttcgggaagcgtggcgctttctcatagctcacgctgtaggtatctcagttcggtgtaggtcgttcgctccaagctgggctgtgtgcacgaaccccccgttcagcccgaccgctgcgccttatccggtaactatcgtcttgagtccaacccggtaagacacgacttatcgccactggcagcagccactggtaacaggattagcagagcgaggtatgtaggcggtgctacagagttcttgaagtggtggcctaactacggctacactagaaggacagtatttggtatctgcgctctgctgaagccagttaccttcggaaaaagagttggtagctcttgatccggcaaacaaaccaccgctggtagcggtggtttttttgtttgcaagcagcagattacgcgcagaaaaaaaggatctcaagaagatcctttgatcttttctacggggtctgacgctcagtggaacgaaaactcacgttaagggattttggtcatgagattatcaaaaaggatcttcacctagatccttttaaattaaaaatgaagttttaaatcaatctaaagtatatatgagtaaacttggtctgacagttaccaatgcttaatcagtgaggcacctatctcagcgatctgtctatttcgttcatccatagttgcctgactccccgtcgtgtagataactacgatacgggagggcttaccatctggccccagtgctgcaatgataccgcgagacccacgctcaccggctccagatttatcagcaataaaccagccagccggaagggccgagcgcagaagtggtcctgcaactttatccgcctccatccagtctattaattgttgccgggaagctagagtaagtagttcgccagttaatagtttgcgcaacgttgttgccattgctacaggcatcgtggtgtcacgctcgtcgtttggtatggcttcattcagctccggttcccaacgatcaaggcgagttacatgatcccccatgttgtgcaaaaaagcggttagctccttcggtcctccgatcgttgtcagaagtaagttggccgcagtgttatcactcatggttatggcagcactgcataattctcttactgtcatgccatccgtaagatgcttttctgtgactggtgagtactcaaccaagtcattctgagaatagtgtatgcggcgaccgagttgctcttgcccggcgtcaatacgggataataccgcgccacatagcagaactttaaaagtgctcatcattggaaaacgttcttcggggcgaaaactctcaaggatcttaccgctgttgagatccagttcgatgtaacccactcgtgcacccaactgatcttcagcatcttttactttcaccagcgtttctgggtgagcaaaaacaggaaggcaaaatgccgcaaaaaagggaataagggcgacacggaaatgttgaatactcatactcttcctttttcaatattattgaagcatttatcagggttattgtctcatgagcggatacatatttgaatgtatttagaaaaataaacaaataggggttccgcgcacatttccccgaaaagtgccacctgaacgaagcatctgtgcttcattttgtagaacaaaaatgcaacgcgagagcgctaatttttcaaacaaagaatctgagctgcatttttacagaacagaaatgcaacgcgaaagcgctattttaccaacgaagaatctgtgcttcatttttgtaaaacaaaaatgcaacgcgagagcgctaatttttcaaacaaagaatctgagctgcatttttacagaacagaaatgcaacgcgagagcgctattttaccaacaaagaatctatacttcttttttgttctacaaaaatgcatcccgagagcgctatttttctaacaaagcatcttagattactttttttctcctttgtgcgctctataatgcagtctcttgataactttttgcactgtaggtccgttaaggttagaagaaggctactttggtgtctattttctcttccataaaaaaagcctgactccacttcccgcgtttactgattactagcgaagctgcgggtgcattttttcaagataaaggcatccccgattatattctataccgatgtggattgcgcatactttgtgaacagaaagtgatagcgttgatgattcttcattggtcagaaaattatgaacggtttcttctattttgtctctatatactacgtataggaaatgtttacattttcgtattgttttcgattcactctatgaatagttcttactacaatttttttgtctaaagagtaatactagagataaacataaaaaatgtagaggtcgagtttagatgcaagttcaaggagcgaaaggtggatgggtaggttatatagggatatagcacagagatatatagcaaagagatacttttgagcaatgtttgtggaagcggtattcgcaatattttagtagctcgttacagtccggtgcgtttttggttttttgaaagtgcgtcttcagagcgcttttggttttcaaaagcgctctgaagttcctatactttctagagaataggaacttcggaataggaacttcaaagcgtttccgaaaacgagcgcttccgaaaatgcaacgcgagctgcgcacatacagctcactgttcacgtcgcacctatatctgcgtgttgcctgtatatatatatacatgagaagaacggcatagtgcgtgtttatgcttaaatgcgtacttatatgcgtctatttatgtaggatgaaaggtagtctagtacctcctgtgatattatcccattccatgcggggtatcgtatgcttccttcagcactaccctttagctgttctatatgctgccactcctcaattggattagtctcatccttcaatgctatcatttcctttgatattggatcatactaagaaaccattattatcatgacattaacctataaaaataggcgtatcacgaggccctttcgtc

SEQ ID NO: 479 - DNA, 3564 bp, Artificial Sequence; identical to SEQ ID NO: 2
  Cassette with Aspergillus nidulans NpgA coding sequence, regulatory sequences and integration sequences
  exon (1170)..(2201)

SEQ ID NO: 480 - DNA, 11114 bp, Artificial Sequence; identical to SEQ ID NO: 3
  Cassette with Dictyostelium discoideum DiPKS(G1516R) coding sequence, regulatory sequences and integration sequences for USER Site XII-1 Integration
  exon (849)..(10292)

SEQ ID NO: 481 - DNA, 10890 bp, Artificial Sequence; identical to SEQ ID NO: 4
  Cassette with Dictyostelium discoideum DiPKS(G1516R) coding sequence, regulatory sequences and integration sequences for Wu Site 1 Integration
  exon (717)..(10160)

SEQ ID NO: 482 - DNA, 11300 bp, Artificial Sequence; identical to SEQ ID NO: 5
  Cassette with Dictyostelium discoideum DiPKS(G1516R) coding sequence, regulatory sequences and integration sequences for Wu Site 3 Integration
  exon (795)..(10238)

SEQ ID NO: 483 - DNA, 11140 bp, Artificial Sequence; identical to SEQ ID NO: 6
  Cassette with Dictyostelium discoideum DiPKS(G1516R) coding sequence, regulatory sequences and integration sequences for Wu Site 6 Integration
  exon (794)..(10237)

SEQ ID NO: 484 - DNA, 11637 bp, Artificial Sequence; identical to SEQ ID NO: 7
  Cassette with Dictyostelium discoideum DiPKS(G1516R) coding sequence, regulatory sequences and integration sequences for Wu Site 18 Integration

SEQ ID NO: 485 - DNA, 7114 bp, Artificial Sequence; identical to SEQ ID NO: 8
  Cassette with coding sequences for S. cerevisiae ALD6 and S. enterica scL641P, regulatory sequences and integration sequences for Flagfeldt Site 19 Integration
  exon (1444)..(2949): CDS for Ald6
  exon (3888)..(5843): CDS for ACS

SEQ ID NO: 486 - DNA, 3256 bp, Artificial Sequence; identical to SEQ ID NO: 9
  Cassette with S. cerevisiae Maf1 coding sequence, regulatory sequences and integration sequences for Flagfeldt Site 5 Integration
  exon (936)..(2123): CDS for Maf1

SEQ ID NO: 487 - DNA, 4254 bp, Artificial Sequence; identical to SEQ ID NO: 10
  Cassette with Erg20(K197E) coding sequence, regulatory sequences and integration sequences for chromosomal modification.
  exon (1364)..(2701): CDS for Erg20(K197E)

SEQ ID NO: 488 - DNA, 3503 bp, Artificial Sequence; identical to SEQ ID NO: 11
  Cassette with Erg20 coding sequence, sterol-responsive regulatory sequences and integration sequences for Flagfeldt Site 18 Integration
  exon (1364)..(2701): CDS for Erg20

SEQ ID NO: 489 - DNA, 4843 bp, Artificial Sequence; identical to SEQ ID NO: 12
  Cassette with tHMGr and IDI coding sequence, regulatory sequences and integration sequences for USER Site X-3 Integration
  exon (877)..(2385): CDS for tHMGR1
  exon (3209)..(4075): CDS for IDI1

SEQ ID NO: 490 - DNA, 7673 bp, Artificial Sequence; identical to SEQ ID NO: 13
  Cassette with Saccharomyces cerevisiae Acc1 (S659A; S1167A) coding sequence, PGK1 promoter and other regulatory sequences, and integration sequence for chromosomal modificatio
  promoter (222)..(971): PGK1
  exon (972)..(7673): Acc1 S659A,S1157A

SEQ ID NO: 491 - DNA, 8980 bp, Artificial Sequence; identical to SEQ ID NO: 18
  Plasmid

SEQ ID NO: 492 - protein, 609 aa, Artificial Sequence
  OstI-pro-alpha-f(I)-OXC52 aa
MRQVWFSWIVGLFLCFFNVSSAAPVNTTTEDETAQIPAEAVIGYSDLEGDFDVAVLPFSNSTNNGLLFINTTIASIAAKEEGVSLEKREAEAMPRENFLKCFSQYIPNNATNLKLVYTQNNPLYMSVLNSTIHNLRFTSDTTPKPLVIVTPSHVSHIQGTILCSKKVGLQIRTRSGGHDSEGMSYISQVPFVIVDLRNMRSIKIDVHSQTAWVEAGATLGEVYYWVNEKNENLSLAAGYCPTVCAGGHFGGGGYGPLMRNYGLAADNIIDAHLVNVHGKVLDRKSMGEDLFWALRGGGAESFGIIVAWKIRLVAVPKSTMFSVKKIMEIHELVKLVNKWQNIAYKYDKDLLLMTHFITRNITDNQGKNKTAIHTYFSSVFLGGVDSLVDLMNKSFPELGIKKTDCRQLSWIDTIIFYSGVVNYDTDNFNKEILLDRSAGQNGAFKIKLDYVKKPIPESVFVQILEKLYEEDIGAGMYALYPYGGIMDEISESAIPFPHRAGILYELWYICSWEKQEDNEKHLNWIRNIYNFMTPYVSKNPRLAYLNYRDLDIGINDPKNPNNYTQARIWGEKYFGKNFDRLVKVKTLVDPNNFFRNEQSIPPLPRHRHG

SEQ ID NO: 493 - protein, 609 aa, Artificial Sequence
  OstI-pro-alpha-f(I)-OXC52-S88A aa
MRQVWFSWIVGLFLCFFNVSSAAPVNTTTEDETAQIPAEAVIGYSDLEGDFDVAVLPFSNSTNNGLLFINTTIASIAAKEEGVSLEKREAEAMPRENFLKCFSQYIPNNATNLKLVYTQNNPLYMSVLNSTIHNLRFTSDTTPKPLVIVTPSHVSHIQGTILCSKKVGLQIRTRSGGHDAEGMSYISQVPFVIVDLRNMRSIKIDVHSQTAWVEAGATLGEVYYWVNEKNENLSLAAGYCPTVCAGGHFGGGGYGPLMRNYGLAADNIIDAHLVNVHGKVLDRKSMGEDLFWALRGGGAESFGIIVAWKIRLVAVPKSTMFSVKKIMEIHELVKLVNKWQNIAYKYDKDLLLMTHFITRNITDNQGKNKTAIHTYFSSVFLGGVDSLVDLMNKSFPELGIKKTDCRQLSWIDTIIFYSGVVNYDTDNFNKEILLDRSAGQNGAFKIKLDYVKKPIPESVFVQILEKLYEEDIGAGMYALYPYGGIMDEISESAIPFPHRAGILYELWYICSWEKQEDNEKHLNWIRNIYNFMTPYVSKNPRLAYLNYRDLDIGINDPKNPNNYTQARIWGEKYFGKNFDRLVKVKTLVDPNNFFRNEQSIPPLPRHRHG

SEQ ID NO: 494 - protein, 609 aa, Artificial Sequence
  OstI-pro-alpha-f(I)-OXC52-A386V aa
MRQVWFSWIVGLFLCFFNVSSAAPVNTTTEDETAQIPAEAVIGYSDLEGDFDVAVLPFSNSTNNGLLFINTTIASIAAKEEGVSLEKREAEAMPRENFLKCFSQYIPNNATNLKLVYTQNNPLYMSVLNSTIHNLRFTSDTTPKPLVIVTPSHVSHIQGTILCSKKVGLQIRTRSGGHDSEGMSYISQVPFVIVDLRNMRSIKIDVHSQTAWVEAGATLGEVYYWVNEKNENLSLAAGYCPTVCAGGHFGGGGYGPLMRNYGLAADNIIDAHLVNVHGKVLDRKSMGEDLFWALRGGGAESFGIIVAWKIRLVAVPKSTMFSVKKIMEIHELVKLVNKWQNIAYKYDKDLLLMTHFITRNITDNQGKNKTAIHTYFSSVFLGGVDSLVDLMNKSFPELGIKKTDCRQLSWIDTIIFYSGVVNYDTDNFNKEILLDRSAGQNGAFKIKLDYVKKPIPESVFVQILEKLYEEDIGAGMYVLYPYGGIMDEISESAIPFPHRAGILYELWYICSWEKQEDNEKHLNWIRNIYNFMTPYVSKNPRLAYLNYRDLDIGINDPKNPNNYTQARIWGEKYFGKNFDRLVKVKTLVDPNNFFRNEQSIPPLPRHRHG

SEQ ID NO: 495 - protein, 701 aa, Artificial Sequence
  OstI-pro-alpha-f(I)-OXC52-L450G aa
MRQVWFSWIVGLFLCFFNVSSAAPVNTTTEDETAQIPAEAVIGYSDLEGDFDVAVLPFSNSTNNGLLFINTTIASIAAKEEGVSLEKREAEAMRQVWFSWIVGLFLCFFNVSSAAPVNTTTEDETAQIPAEAVIGYSDLEGDFDVAVLPFSNSTNNGLLFINTTIASIAAKEEGVSLEKREAEAMPRENFLKCFSQYIPNNATNLKLVYTQNNPLYMSVLNSTIHNLRFTSDTTPKPLVIVTPSHVSHIQGTILCSKKVGLQIRTRSGGHDSEGMSYISQVPFVIVDLRNMRSIKIDVHSQTAWVEAGATLGEVYYWVNEKNENLSLAAGYCPTVCAGGHFGGGGYGPLMRNYGLAADNIIDAHLVNVHGKVLDRKSMGEDLFWALRGGGAESFGIIVAWKIRLVAVPKSTMFSVKKIMEIHELVKLVNKWQNIAYKYDKDLLLMTHFITRNITDNQGKNKTAIHTYFSSVFLGGVDSLVDLMNKSFPELGIKKTDCRQLSWIDTIIFYSGVVNYDTDNFNKEILLDRSAGQNGAFKIKLDYVKKPIPESVFVQILEKLYEEDIGAGMYALYPYGGIMDEISESAIPFPHRAGILYELWYICSWEKQEDNEKHLNWIRNIYNFMTPYVSKNPRGAYLNYRDLDIGINDPKNPNNYTQARIWGEKYFGKNFDRLVKVKTLVDPNNFFRNEQSIPPLPRHRHG

SEQ ID NO: 496 - protein, 517 aa, Artificial Sequence
  OstI-pro-alpha-f(I)-OXC52-G350I aa
MPRENFLKCFSQYIPNNATNLKLVYTQNNPLYMSVLNSTIHNLRFTSDTTPKPLVIVTPSHVSHIQGTILCSKKVGLQIRTRSGGHDSEGMSYISQVPFVIVDLRNMRSIKIDVHSQTAWVEAGATLGEVYYWVNEKNENLSLAAGYCPTVCAGGHFGGGGYGPLMRNYGLAADNIIDAHLVNVHGKVLDRKSMGEDLFWALRGGGAESFGIIVAWKIRLVAVPKSTMFSVKKIMEIHELVKLVNKWQNIAYKYDKDLLLMTHFITRNITDNQGKNKTAIHTYFSSVFLGGVDSLVDLMNKSFPELGIKKTDCRQLSWIDTIIFYSGVVNYDTDNFNKEILLDRSAGQNIAFKIKLDYVKKPIPESVFVQILEKLYEEDIGAGMYALYPYGGIMDEISESAIPFPHRAGILYELWYICSWEKQEDNEKHLNWIRNIYNFMTPYVSKNPRLAYLNYRDLDIGINDPKNPNNYTQARIWGEKYFGKNFDRLVKVKTLVDPNNFFRNEQSIPPLPRHRHG

SEQ ID NO: 497 - protein, 609 aa, Artificial Sequence
  OstI-pro-alpha-f(I)-OXC52-R3W aa
MRQVWFSWIVGLFLCFFNVSSAAPVNTTTEDETAQIPAEAVIGYSDLEGDFDVAVLPFSNSTNNGLLFINTTIASIAAKEEGVSLEKREAEAMPWENFLKCFSQYIPNNATNLKLVYTQNNPLYMSVLNSTIHNLRFTSDTTPKPLVIVTPSHVSHIQGTILCSKKVGLQIRTRSGGHDSEGMSYISQVPFVIVDLRNMRSIKIDVHSQTAWVEAGATLGEVYYWVNEKNENLSLAAGYCPTVCAGGHFGGGGYGPLMRNYGLAADNIIDAHLVNVHGKVLDRKSMGEDLFWALRGGGAESFGIIVAWKIRLVAVPKSTMFSVKKIMEIHELVKLVNKWQNIAYKYDKDLLLMTHFITRNITDNQGKNKTAIHTYFSSVFLGGVDSLVDLMNKSFPELGIKKTDCRQLSWIDTIIFYSGVVNYDTDNFNKEILLDRSAGQNGAFKIKLDYVKKPIPESVFVQILEKLYEEDIGAGMYALYPYGGIMDEISESAIPFPHRAGILYELWYICSWEKQEDNEKHLNWIRNIYNFMTPYVSKNPRLAYLNYRDLDIGINDPKNPNNYTQARIWGEKYFGKNFDRLVKVKTLVDPNNFFRNEQSIPPLPRHRHG

SEQ ID NO: 498 - protein, 610 aa, Artificial Sequence
  OstI-pro-alpha-f(I)-OXC52-Serine insertion at P224 aa
MRQVWFSWIVGLFLCFFNVSSAAPVNTTTEDETAQIPAEAVIGYSDLEGDFDVAVLPFSNSTNNGLLFINTTIASIAAKEEGVSLEKREAEAMPRENFLKCFSQYIPNNATNLKLVYTQNNPLYMSVLNSTIHNLRFTSDTTPKPLVIVTPSHVSHIQGTILCSKKVGLQIRTRSGGHDSEGMSYISQVPFVIVDLRNMRSIKIDVHSQTAWVEAGATLGEVYYWVNEKNENLSLAAGYCPTVCAGGHFGGGGYGPLMRNYGLAADNIIDAHLVNVHGKVLDRKSMGEDLFWALRGGGAESFGIIVAWKIRLVAVPSKSTMFSVKKIMEIHELVKLVNKWQNIAYKYDKDLLLMTHFITRNITDNQGKNKTAIHTYFSSVFLGGVDSLVDLMNKSFPELGIKKTDCRQLSWIDTIIFYSGVVNYDTDNFNKEILLDRSAGQNGAFKIKLDYVKKPIPESVFVQILEKLYEEDIGAGMYALYPYGGIMDEISESAIPFPHRAGILYELWYICSWEKQEDNEKHLNWIRNIYNFMTPYVSKNPRLAYLNYRDLDIGINDPKNPNNYTQARIWGEKYFGKNFDRLVKVKTLVDPNNFFRNEQSIPPLPRHRHG

SEQ ID NO: 499 - protein, 609 aa, Artificial Sequence
  OstI-pro-alpha-f(I)-OXC52-S88A/L450G/R3W aa
MRQVWFSWIVGLFLCFFNVSSAAPVNTTTEDETAQIPAEAVIGYSDLEGDFDVAVLPFSNSTNNGLLFINTTIASIAAKEEGVSLEKREAEAMPWENFLKCFSQYIPNNATNLKLVYTQNNPLYMSVLNSTIHNLRFTSDTTPKPLVIVTPSHVSHIQGTILCSKKVGLQIRTRSGGHDAEGMSYISQVPFVIVDLRNMRSIKIDVHSQTAWVEAGATLGEVYYWVNEKNENLSLAAGYCPTVCAGGHFGGGGYGPLMRNYGLAADNIIDAHLVNVHGKVLDRKSMGEDLFWALRGGGAESFGIIVAWKIRLVAVPKSTMFSVKKIMEIHELVKLVNKWQNIAYKYDKDLLLMTHFITRNITDNQGKNKTAIHTYFSSVFLGGVDSLVDLMNKSFPELGIKKTDCRQLSWIDTIIFYSGVVNYDTDNFNKEILLDRSAGQNGAFKIKLDYVKKPIPESVFVQILEKLYEEDIGAGMYALYPYGGIMDEISESAIPFPHRAGILYELWYICSWEKQEDNEKHLNWIRNIYNFMTPYVSKNPRGAYLNYRDLDIGINDPKNPNNYTQARIWGEKYFGKNFDRLVKVKTLVDPNNFFRNEQSIPPLPRHRHG

SEQ ID NO: 500 - protein, 610 aa, Artificial Sequence
  OstI-pro-alpha-f(I)-OXC52-S88A/450G/Serine insertion at P224 aa
MRQVWFSWIVGLFLCFFNVSSAAPVNTTTEDETAQIPAEAVIGYSDLEGDFDVAVLPFSNSTNNGLLFINTTIASIAAKEEGVSLEKREAEAMPRENFLKCFSQYIPNNATNLKLVYTQNNPLYMSVLNSTIHNLRFTSDTTPKPLVIVTPSHVSHIQGTILCSKKVGLQIRTRSGGHDAEGMSYISQVPFVIVDLRNMRSIKIDVHSQTAWVEAGATLGEVYYWVNEKNENLSLAAGYCPTVCAGGHFGGGGYGPLMRNYGLAADNIIDAHLVNVHGKVLDRKSMGEDLFWALRGGGAESFGIIVAWKIRLVAVPSKSTMFSVKKIMEIHELVKLVNKWQNIAYKYDKDLLLMTHFITRNITDNQGKNKTAIHTYFSSVFLGGVDSLVDLMNKSFPELGIKKTDCRQLSWIDTIIFYSGVVNYDTDNFNKEILLDRSAGQNGAFKIKLDYVKKPIPESVFVQILEKLYEEDIGAGMYALYPYGGIMDEISESAIPFPHRAGILYELWYICSWEKQEDNEKHLNWIRNIYNFMTPYVSKNPRGAYLNYRDLDIGINDPKNPNNYTQARIWGEKYFGKNFDRLVKVKTLVDPNNFFRNEQSIPPLPRHRHG

SEQ ID NO: 501 - protein, 610 aa, Artificial Sequence
  OstI-pro-alpha-f(I)-OXC53 aa
MRQVWFSWIVGLFLCFFNVSSAAPVNTTTEDETAQIPAEAVIGYSDLEGDFDVAVLPFSNSTNNGLLFINTTIASIAAKEEGVSLEKREAEAMPRENFLKCFSKHIPNNVANPKLVYTQHDQLYMSILNSTIQNLRFISDTTPKPLVIVTPSNNSHIQATILCSKKVGLQIRTRSGGHDAEGMSYISQVPFVVVDLRNMHSIKIDVHSQTAWVEAGATLGEVYYWINEKNENLSFPGGYCPTVGVGGHFSGGGYGALMRNYGLAADNIIDAHLVNVDGKVLDRKSMGEDLFWAIRGGGGENFGIIAAWKIKLVAVPSKSTIFSVKKNMEIHGLVKLFNKWQNIAYKYDKDLVLMTHFITKNITDNHGKNKTTVHGYFSSIFHGGVDSLVDLMNKSFPELGIKKTDCKEFSWIDTTIFYSGVVNFNTANFKKEILLDRSAGKKTAFSIKLDYVKKPIPETAMVKILEKLYEEDVGAGMYVLYPYGGIMEEISESAIPFPHRAGIMYELWYTASWEKQEDNEKHINWVRSVYNFTTPYVSQNPRLAYLNYRDLDLGKTNHASPNNYTQARIWGEKYFGKNFNRLVKVKTKVDPNNFFRNEQSIPPLPPHHHG

SEQ ID NO: 502 - protein, 609 aa, Artificial Sequence
  OstI-pro-alpha-f(I)-OXC53 - S225 del aa
MRQVWFSWIVGLFLCFFNVSSAAPVNTTTEDETAQIPAEAVIGYSDLEGDFDVAVLPFSNSTNNGLLFINTTIASIAAKEEGVSLEKREAEAMPRENFLKCFSKHIPNNVANPKLVYTQHDQLYMSILNSTIQNLRFISDTTPKPLVIVTPSNNSHIQATILCSKKVGLQIRTRSGGHDAEGMSYISQVPFVVVDLRNMHSIKIDVHSQTAWVEAGATLGEVYYWINEKNENLSFPGGYCPTVGVGGHFSGGGYGALMRNYGLAADNIIDAHLVNVDGKVLDRKSMGEDLFWAIRGGGGENFGIIAAWKIKLVAVPKSTIFSVKKNMEIHGLVKLFNKWQNIAYKYDKDLVLMTHFITKNITDNHGKNKTTVHGYFSSIFHGGVDSLVDLMNKSFPELGIKKTDCKEFSWIDTTIFYSGVVNFNTANFKKEILLDRSAGKKTAFSIKLDYVKKPIPETAMVKILEKLYEEDVGAGMYVLYPYGGIMEEISESAIPFPHRAGIMYELWYTASWEKQEDNEKHINWVRSVYNFTTPYVSQNPRLAYLNYRDLDLGKTNHASPNNYTQARIWGEKYFGKNFNRLVKVKTKVDPNNFFRNEQSIPPLPPHHHG

SEQ ID NO: 503 - protein, 2098 aa, Artificial Sequence; identical to SEQ ID NO: 98
  PKS110 aa

SEQ ID NO: 504 - protein, 232 aa, Artificial Sequence
  RFP
MVSKGEAVIKEFMRFKVHMEGSMNGHEFEIEGEGEGRPYEGTQTAKLKVTKGGPLPFSWDILSPQFMYGSRAFTKHPADIPDYYKQSFPEGFKWERVMNFEDGGAVTVTQDTSLEDGTLIYKVKLRGTNFPPDGPVMQKKTMGWEASTERLYPEDGVLKGDIKMALRLKDGGRYLADFKTTYKAKKPVQMPGAYNVDRKLDITSHNEDYTVVEQYERSEGRHSTGGMDELYK

SEQ ID NO: 505 - DNA, 7615 bp, Artificial Sequence
  PLAS415
  rep_origin (957)..(1837): /label="yeast 2u plasmid origin of replication"       /ApEinfo_revcolor=#75c6a9/ApEinfo_fwdcolor=#75c 6a9
  misc_feature (2380)..(2399): /label="gRNA_gal_1"       /ApEinfo_revcolor=#faac61/ApEinfo_fwdcolor=#faac61
  promoter (2853)..(2871): /label="promoter for bacteriophage T7 RNA polymerase"       /ApEinfo_revcolor=#75c6a9/ApEinfo_fwdcolo r=#75c6a9
  misc_feature (4720)..(4759): /label="Homology Section-CTerm"       /ApEinfo_revcolor=#b4abac/ApEinfo_fwdcolor=#b4abac
  terminator (4720)..(4993): /label="S. cerevisiae CYC1 terminator"       /ApEinfo_revcolor=#84b0dc/ApEinfo_fwdcolor=#84b0dc
  misc_feature (5108)..(5127): /label="gRNA_3'_2"       /ApEinfo_revcolor=#b4abac/ApEinfo_fwdcolor=#b4abac
  misc_feature (5135)..(5154): /label="gRNA_3'_3"       /ApEinfo_revcolor=#ff9ccd/ApEinfo_fwdcolor=#ff9ccd
  rep_origin (5234)..(5822): /label="high-copy-number ColE1/pMB1/pBR322/pUC origin of replication"       /ApEinfo_revcolor=#c7b0e3/ApEinfo_fwdcolor=#c7b0e3
tccagtaattccttggtggtacgaacatccaatgaagcacacaagtttgtttgcttttcgtgcatgatattaaatagcttggcagcaacaggactaggatgagtagcagcacgttccttatatgtagctttcgacatgatttatcttcgtttcctgcaggtttttgttctgtgcagttgggttaagaatactgggcaatttcatgtttcttcaacactacatatgcgtatatataccaatctaagtctgtgctccttccttcgttcttccttctgttcggagattaccgaatcaaaaaaatttcaaagaaaccgaaatcaaaaaaaagaataaaaaaaaaatgatgaattgaattgaaaagctagcttatcgatgataagctgtcaaagatgagaattaattccacggactatagactatactagatactccgtctactgtacgatacacttccgctcaggtccttgtcctttaacgaggccttaccactcttttgttactctattgatccagctcagcaaaggcagtgtgatctaagattctatcttcgcgatgtagtaaaactagctagaccgagaaagagactagaaatgcaaaaggcacttctacaatggctgccatcattattatccgatgtgacgctgcagcttctcaatgatattcgaatacgctttgaggagatacagcctaatatccgacaaactgttttacagatttacgatcgtacttgttacccatcattgaattttgaacatccgaacctgggagttttccctgaaacagatagtatatttgaacctgtataataatatatagtctagcgctttacggaagacaatgtatgtatttcggttcctggagaaactattgcatctattgcataggtaatcttgcacgtcgcatccccggttcattttctgcgtttccatcttgcacttcaatagcatatctttgttaacgaagcatctgtgcttcattttgtagaacaaaaatgcaacgcgagagcgctaatttttcaaacaaagaatctgagctgcatttttacagaacagaaatgcaacgcgaaagcgctattttaccaacgaagaatctgtgcttcatttttgtaaaacaaaaatgcaacgcgacgagagcgctaatttttcaaacaaagaatctgagctgcatttttacagaacagaaatgcaacgcgagagcgctattttaccaacaaagaatctatacttcttttttgttctacaaaaatgcatcccgagagcgctatttttctaacaaagcatcttagattactttttttctcctttgtgcgctctataatgcagtctcttgataactttttgcactgtaggtccgttaaggttagaagaaggctactttggtgtctattttctcttccataaaaaaagcctgactccacttcccgcgtttactgattactagcgaagctgcgggtgcattttttcaagataaaggcatccccgattatattctataccgatgtggattgcgcatactttgtgaacagaaagtgatagcgttgatgattcttcattggtcagaaaattatgaacggtttcttctattttgtctctatatactacgtataggaaatgtttacattttcgtattgttttcgattcactctatgaatagttcttactacaatttttttgtctaaagagtaatactagagataaacataaaaaatgtagaggtcgagtttagatgcaagttcaaggagcgaaaggtggatgggtaggttatatagggatatagcacagagatatatagcaaagagatacttttgagcaatgtttgtggaagcggtattcgcaatgggaagctccaccccggttgataatcagaaaagccccaaaaacaggaagattgtataagcaaatatttaaattgtaaacgttaatattttgttaaaattcgcgttaaatttttgttaaatcagctcattttttaacgaatagcccgaaatcggcaaaatcccttataaatcaaaagaatagaccgagatagggttgagtgttgttccagtttccaacaagagtccactattaaagaacgtggactccaacgtcaaagggcgaaaaagggtctatcagggcgatggcccactacgtgaaccatcaccctaatcaagttttttggggtcgaggtgccgtaaagcagtaaatcggaagggtaaacggatgcccccatttagagcttgacggggaaagccggcgaacgtggcgagaaaggaagggaagaaagcgaaaggagcgggggctagggcggtgggaagtgtaggggtcacgctgggcgtaaccaccacacccgccgcgcttaatggggcgctacagggcgcgtggggatgatccactagtacggattagaagccgccgagcgggtgacagccctccgaaggaagactctcctccgtgcgtcctcgtcttcaccggtcgcgttcctgaaacgcagatgtgcctcgcgccgcactgctccgaacaataaagattctacaatactagcttttatggttatgaagaggaaaaattggcagtaacctggccccacaaaccttcaaatgaacgaatcaaattaacaaccataggatgataatgcgattagttttttagccttatttctggggtaattaatcagcgaagcgatgatttttgatctattaacagatatataaatgcaaaaactgcataaccactttaactaatactttcaacattttcggtttgtattacttcttattcaaatgtaataaaagtatcaacaaaaaattgttaatatacctctatactttaacgtcaaggagaaaaaaccccggatcggactactagcagctgtaatacgactcactatagggaatattaagcttaaacaatgaggcaggtttggttctcttggattgtgggattgttcctatgttttttcaacgtgtcttctgctgctccagtcaacactacaacagaagatgaaacggcacaaattccggctgaagctgtcatcggttactcagatttagaaggggatttcgatgttgctgttttgccattttccaacagcacaaataacgggttattgtttataaatactactattgccagcattgctgctaaagaagaaggggtatctctcgagaaaagagaggctgaagctatgccaagagaaaacttcttgaagtgcttctcccaatatatcccaaacaacgctactaacttaaagttagtttacactcaaaacaatccattatacatgtctgtcttaaactctactattcataacttaagatttacttccgatactacccctaagccattggttatcgtcaccccatctcacgtctcccatatccaaggtactatcttatgttctaagaaggttggtttgcaaatccgtactagatctggtggtcacgactctgaaggtatgtcctatatctctcaagtcccatttgtcattgttgacttaagaaatatgagatccattaaaattgatgttcattctcaaactgcttgggtcgaagctggtgccaccttgggtgaagtttactactgggtcaacgaaaaaaacgaaaacttatctttagctgccggttactgtccaaccgtctgtgctggtggtcatttcggtggtggtggttacggtccattgatgcgtaactacggtttagctgctgacaacattattgacgctcatttagttaatgttcacggtaaggttttggacagaaaatctatgggtgaagatttattttgggccttgagaggtggtggtgctgaatccttcggtatcatcgttgcctggaagattcgtttagttgctgtccctaagtccaccatgttctccgtcaagaaaatcatggaaattcatgagttggtcaaattggttaacaagtggcaaaacatcgcttacaagtatgacaaggatttgttgttaatgactcacttcatcacccgtaatatcaccgacaaccaaggtaagaacaaaactgctattcacacctacttctcctccgtttttttgggtggtgtcgactccttagtcgatttgatgaacaaatcctttccagaattgggtattaagaaaactgattgtagacaattgtcttggattgacaccattatcttctattctggtgtcgttaactacgacaccgacaactttaacaaggaaattttgttggatcgttctgctggtcaaaatggtgccttcaaaatcaaattggactacgtcaaaaagccaatcccagaatctgttttcgttcaaattttggaaaagttgtacgaagaagacattggtgccggtatgtatgctttgtatccatatggtggtatcatggacgaaatttccgaatctgccatcccattcccacacagagctggtattttatatgaattgtggtacatctgttcttgggaaaagcaagaagacaacgaaaagcatttaaactggattagaaacatttacaacttcatgaccccatacgtttctaagaacccaagattagcctatttgaactaccgtgacttagatattggtattaatgacccaaagaacccaaacaactatactcaagccagaatttggggtgaaaagtacttcggtaagaacttcgatagattagttaaggttaaaactttggtcgatccaaacaacttcttcagaaacgaacaatccatcccaccattgccaagacatcgtcacggctagctcgagcatgcatctagagggccgcatcatgtaattagttatgtcacgcttacattcacgccctccccccacatccgctctaaccgaaaaggaaggagttagacaacctgaagtctaggtccctatttatttttttatagttatgttagtattaagaacgttatttatatttcaaatttttcttttttttctgtacagacgcgtgtacgcatgtaacattatactgaaaaccttgcttgagaaggttttgggacgctcgaaggctttaatttgcggccctgcattaatgaatcggccaacgcgcggggagaggcggtttgcgtattgggcgctcttccgcttcctcgctcactgactcgctgcgctcggtcgttcggctgcggcgagcggtatcagctcactcaaaggcggtaatacggttatccacagaatcaggggataacgcaggaaagaacatgtgagcaaaaggccagcaaaagcccaggaaccgtaaaaaggccgcgttgctggcgtttttccataggctccgcccccctgacgagcatcacaaaaatcgacgctcaagtcagaggtggcgaaacccgacaggactataaagataccaggcgtttccccctggaagctccctcgtgcgctctcctgttccgaccctgccgcttaccggatacctgtccgcctttctcccttcgggaagcgtggcgctttctcatagctcacgctgtaggtatctcagttcggtgtaggtcgttcgctccaagctgggctgtgtgcacgaaccccccgttcagcccgaccgctgcgccttatccggtaactatcgtcttgagtccaacccggtaagacacgacttatcgccactggcagcagccactggtaacaggattagcagagcgaggtatgtaggcggtgctacagagttcttgaagtggtggcctaactacggctacactagaaggacagtatttggtatctgcgctctgctgaagccagttaccttcggaaaaagagttggtagctcttgatccggcaaacaaaccaccgctggtagcggtggtttttttgtttgcaagcagcagattacgcgcagaaaaaaaggatctcaagaagatcctttgatcttttctacggggtctgacgctcagtggaacgaaaactcacgttaagggattttggtcatgagattatcaaaaaggatcttcacctagatccttttaaattaaaaatgaagttttaaatcaatctaaagtatatatgagtaaacttggtctgacagttaccaatgcttaatcagtgaggcacctatctcagcgatctgtctatttcgttcatccatagttgcctgactccccgtcgtgtagataactacgatacgggagcgcttaccatctggccccagtgctgcaatgataccgcgagacccacgctcaccggctccagatttatcagcaataaaccagccagccggaagggccgagcgcagaagtggtcctgcaactttatccgcctccattcagtctattaattgttgccgggaagctagagtaagtagttcgccagttaatagtttgcgcaacgttgttggcattgctacaggcatcgtggtgtcactctcgtcgtttggtatggcttcattcagctccggttcccaacgatcaaggcgagttacatgatcccccatgttgtgcaaaaaagcggttagctccttcggtcctccgatcgttgtcagaagtaagttggccgcagtgttatcactcatggttatggcagcactgcataattctcttactgtcatgccatccgtaagatgcttttctgtgactggtgagtactcaaccaagtcattctgagaatagtgtatgcggcgaccgagttgctcttgcccggcgtcaatacgggataatagtgtatcacatagcagaactttaaaagtgctcatcattggaaaacgttcttcggggcgaaaactctcaaggatcttaccgctgttgagatccagttcgatgtaacccactcgtgcacccaactgatcttcagcatcttttactttcaccagcgtttctgggtgagcaaaaacaggaaggcaaaatgccgcaaaaaagggaataagggcgacacggaaatgttgaatactcatactcttcctttttcaatgggtaataactgatataattaaattgaagctctaatttgtgagtttagtatacatgcatttacttataatacagttttttagttttgctggccgcatcttctcaaatatgcttcccagcctgcttttctgtaacgttcaccctctaccttagcatcccttccctttgcaaatagtcctcttccaacaataataatgtcagatcctgtagagaccacatcatccacggttctatactgttgacccaatgcgtctcccttgtcatctaaacccacaccgggtgtcataatcaaccaatcgtaaccttcatctcttccacccatgtctctttgagcaataaagccgataacaaaatctttgtcgctcttcgcaatgtcaacagtacccttagtatattctccagtagatagggagcccttgcatgacaattctgctaacatcaaaaggcctctaggttcctttgttacttcttctgccgcctgcttcaaaccgctaacaatacctgggcccaccacaccgtgtgcattcgtaatgtctgcccattctgctattctgtatacacccgcagagtactgcaatttgactgtattaccaatgtcagcaaattttctgtcttcgaagagtaaaaaattgtacttggcggataatgcctttagcggcttaactgtgccctccatggaaaaatcagtcaagatatccacatgtgtttttagtaaacaaattttgggacctaatgcttcaactaac

SEQ ID NO: 506 - DNA, 7615 bp, Artificial Sequence
  PLAS459
tccagtaattccttggtggtacgaacatccaatgaagcacacaagtttgtttgcttttcgtgcatgatattaaatagcttggcagcaacaggactaggatgagtagcagcacgttccttatatgtagctttcgacatgatttatcttcgtttcctgcaggtttttgttctgtgcagttgggttaagaatactgggcaatttcatgtttcttcaacactacatatgcgtatatataccaatctaagtctgtgctccttccttcgttcttccttctgttcggagattaccgaatcaaaaaaatttcaaagaaaccgaaatcaaaaaaaagaataaaaaaaaaatgatgaattgaattgaaaagctagcttatcgatgataagctgtcaaagatgagaattaattccacggactatagactatactagatactccgtctactgtacgatacacttccgctcaggtccttgtcctttaacgaggccttaccactcttttgttactctattgatccagctcagcaaaggcagtgtgatctaagattctatcttcgcgatgtagtaaaactagctagaccgagaaagagactagaaatgcaaaaggcacttctacaatggctgccatcattattatccgatgtgacgctgcagcttctcaatgatattcgaatacgctttgaggagatacagcctaatatccgacaaactgttttacagatttacgatcgtacttgttacccatcattgaattttgaacatccgaacctgggagttttccctgaaacagatagtatatttgaacctgtataataatatatagtctagcgctttacggaagacaatgtatgtatttcggttcctggagaaactattgcatctattgcataggtaatcttgcacgtcgcatccccggttcattttctgcgtttccatcttgcacttcaatagcatatctttgttaacgaagcatctgtgcttcattttgtagaacaaaaatgcaacgcgagagcgctaatttttcaaacaaagaatctgagctgcatttttacagaacagaaatgcaacgcgaaagcgctattttaccaacgaagaatctgtgcttcatttttgtaaaacaaaaatgcaacgcgacgagagcgctaatttttcaaacaaagaatctgagctgcatttttacagaacagaaatgcaacgcgagagcgctattttaccaacaaagaatctatacttcttttttgttctacaaaaatgcatcccgagagcgctatttttctaacaaagcatcttagattactttttttctcctttgtgcgctctataatgcagtctcttgataactttttgcactgtaggtccgttaaggttagaagaaggctactttggtgtctattttctcttccataaaaaaagcctgactccacttcccgcgtttactgattactagcgaagctgcgggtgcattttttcaagataaaggcatccccgattatattctataccgatgtggattgcgcatactttgtgaacagaaagtgatagcgttgatgattcttcattggtcagaaaattatgaacggtttcttctattttgtctctatatactacgtataggaaatgtttacattttcgtattgttttcgattcactctatgaatagttcttactacaatttttttgtctaaagagtaatactagagataaacataaaaaatgtagaggtcgagtttagatgcaagttcaaggagcgaaaggtggatgggtaggttatatagggatatagcacagagatatatagcaaagagatacttttgagcaatgtttgtggaagcggtattcgcaatgggaagctccaccccggttgataatcagaaaagccccaaaaacaggaagattgtataagcaaatatttaaattgtaaacgttaatattttgttaaaattcgcgttaaatttttgttaaatcagctcattttttaacgaatagcccgaaatcggcaaaatcccttataaatcaaaagaatagaccgagatagggttgagtgttgttccagtttccaacaagagtccactattaaagaacgtggactccaacgtcaaagggcgaaaaagggtctatcagggcgatggcccactacgtgaaccatcaccctaatcaagttttttggggtcgaggtgccgtaaagcagtaaatcggaagggtaaacggatgcccccatttagagcttgacggggaaagccggcgaacgtggcgagaaaggaagggaagaaagcgaaaggagcgggggctagggcggtgggaagtgtaggggtcacgctgggcgtaaccaccacacccgccgcgcttaatggggcgctacagggcgcgtggggatgatccactagtacggattagaagccgccgagcgggtgacagccctccgaaggaagactctcctccgtgcgtcctcgtcttcaccggtcgcgttcctgaaacgcagatgtgcctcgcgccgcactgctccgaacaataaagattctacaatactagcttttatggttatgaagaggaaaaattggcagtaacctggccccacaaaccttcaaatgaacgaatcaaattaacaaccataggatgataatgcgattagttttttagccttatttctggggtaattaatcagcgaagcgatgatttttgatctattaacagatatataaatgcaaaaactgcataaccactttaactaatactttcaacattttcggtttgtattacttcttattcaaatgtaataaaagtatcaacaaaaaattgttaatatacctctatactttaacgtcaaggagaaaaaaccccggatcggactactagcagctgtaatacgactcactatagggaatattaagcttaaacaatgaggcaggtttggttctcttggattgtgggattgttcctatgttttttcaacgtgtcttctgctgctccagtcaacactacaacagaagatgaaacggcacaaattccggctgaagctgtcatcggttactcagatttagaaggggatttcgatgttgctgttttgccattttccaacagcacaaataacgggttattgtttataaatactactattgccagcattgctgctaaagaagaaggggtatctctcgagaaaagagaggctgaagctatgccaagagaaaacttcttgaagtgcttctcccaatatatcccaaacaacgctactaacttaaagttagtttacactcaaaacaatccattatacatgtctgtcttaaactctactattcataacttaagatttacttccgatactacccctaagccattggttatcgtcaccccatctcacgtctcccatatccaaggtactatcttatgttctaagaaggttggtttgcaaatccgtactagatctggtggtcacgactctgaaggtatgtcctatatctctcaagtcccatttgtcattgttgacttaagaaatatgagatccattaaaattgatgttcattctcaaactgcttgggtcgaagctggtgccaccttgggtgaagtttactactgggtcaacgaaaaaaacgaaaacttatctttagctgccggttactgtccaaccgtctgtgctggtggtcatttcggtggtggtggttacggtccattgatgcgtaactacggtttagctgctgacaacattattgacgctcatttagttaatgttcacggtaaggttttggacagaaaatctatgggtgaagatttattttgggccttgagaggtggtggtgctgaatccttcggtatcatcgttgcctggaagattcgtttagttgctgtccctaagtccaccatgttctccgtcaagaaaatcatggaaattcatgagttggtcaaattggttaacaagtggcaaaacatcgcttacaagtatgacaaggatttgttgttaatgactcacttcatcacccgtaatatcaccgacaaccaaggtaagaacaaaactgctattcacacctacttctcctccgtttttttgggtggtgtcgactccttagtcgatttgatgaacaaatcctttccagaattgggtattaagaaaactgattgtagacaattgtcttggattgacaccattatcttctattctggtgtcgttaactacgacaccgacaactttaacaaggaaattttgttggatcgttctgctggtcaaaatggtgccttcaaaatcaaattggactacgtcaaaaagccaatcccagaatctgttttcgttcaaattttggaaaagttgtacgaagaagacattggtgccggtatgtatgctttgtatccatatggtggtatcatggacgaaatttccgaatctgccatcccattcccacacagagctggtattttatatgaattgtggtacatctgttcttgggaaaagcaagaagacaacgaaaagcatttaaactggattagaaacatttacaacttcatgaccccatacgtttctaagaacccaagaggtgcctatttgaactaccgtgacttagatattggtattaatgacccaaagaacccaaacaactatactcaagccagaatttggggtgaaaagtacttcggtaagaacttcgatagattagttaaggttaaaactttggtcgatccaaacaacttcttcagaaacgaacaatccatcccaccattgccaagacatcgtcacggctagctcgagcatgcatctagagggccgcatcatgtaattagttatgtcacgcttacattcacgccctccccccacatccgctctaaccgaaaaggaaggagttagacaacctgaagtctaggtccctatttatttttttatagttatgttagtattaagaacgttatttatatttcaaatttttcttttttttctgtacagacgcgtgtacgcatgtaacattatactgaaaaccttgcttgagaaggttttgggacgctcgaaggctttaatttgcggccctgcattaatgaatcggccaacgcgcggggagaggcggtttgcgtattgggcgctcttccgcttcctcgctcactgactcgctgcgctcggtcgttcggctgcggcgagcggtatcagctcactcaaaggcggtaatacggttatccacagaatcaggggataacgcaggaaagaacatgtgagcaaaaggccagcaaaagcccaggaaccgtaaaaaggccgcgttgctggcgtttttccataggctccgcccccctgacgagcatcacaaaaatcgacgctcaagtcagaggtggcgaaacccgacaggactataaagataccaggcgtttccccctggaagctccctcgtgcgctctcctgttccgaccctgccgcttaccggatacctgtccgcctttctcccttcgggaagcgtggcgctttctcatagctcacgctgtaggtatctcagttcggtgtaggtcgttcgctccaagctgggctgtgtgcacgaaccccccgttcagcccgaccgctgcgccttatccggtaactatcgtcttgagtccaacccggtaagacacgacttatcgccactggcagcagccactggtaacaggattagcagagcgaggtatgtaggcggtgctacagagttcttgaagtggtggcctaactacggctacactagaaggacagtatttggtatctgcgctctgctgaagccagttaccttcggaaaaagagttggtagctcttgatccggcaaacaaaccaccgctggtagcggtggtttttttgtttgcaagcagcagattacgcgcagaaaaaaaggatctcaagaagatcctttgatcttttctacggggtctgacgctcagtggaacgaaaactcacgttaagggattttggtcatgagattatcaaaaaggatcttcacctagatccttttaaattaaaaatgaagttttaaatcaatctaaagtatatatgagtaaacttggtctgacagttaccaatgcttaatcagtgaggcacctatctcagcgatctgtctatttcgttcatccatagttgcctgactccccgtcgtgtagataactacgatacgggagcgcttaccatctggccccagtgctgcaatgataccgcgagacccacgctcaccggctccagatttatcagcaataaaccagccagccggaagggccgagcgcagaagtggtcctgcaactttatccgcctccattcagtctattaattgttgccgggaagctagagtaagtagttcgccagttaatagtttgcgcaacgttgttggcattgctacaggcatcgtggtgtcactctcgtcgtttggtatggcttcattcagctccggttcccaacgatcaaggcgagttacatgatcccccatgttgtgcaaaaaagcggttagctccttcggtcctccgatcgttgtcagaagtaagttggccgcagtgttatcactcatggttatggcagcactgcataattctcttactgtcatgccatccgtaagatgcttttctgtgactggtgagtactcaaccaagtcattctgagaatagtgtatgcggcgaccgagttgctcttgcccggcgtcaatacgggataatagtgtatcacatagcagaactttaaaagtgctcatcattggaaaacgttcttcggggcgaaaactctcaaggatcttaccgctgttgagatccagttcgatgtaacccactcgtgcacccaactgatcttcagcatcttttactttcaccagcgtttctgggtgagcaaaaacaggaaggcaaaatgccgcaaaaaagggaataagggcgacacggaaatgttgaatactcatactcttcctttttcaatgggtaataactgatataattaaattgaagctctaatttgtgagtttagtatacatgcatttacttataatacagttttttagttttgctggccgcatcttctcaaatatgcttcccagcctgcttttctgtaacgttcaccctctaccttagcatcccttccctttgcaaatagtcctcttccaacaataataatgtcagatcctgtagagaccacatcatccacggttctatactgttgacccaatgcgtctcccttgtcatctaaacccacaccgggtgtcataatcaaccaatcgtaaccttcatctcttccacccatgtctctttgagcaataaagccgataacaaaatctttgtcgctcttcgcaatgtcaacagtacccttagtatattctccagtagatagggagcccttgcatgacaattctgctaacatcaaaaggcctctaggttcctttgttacttcttctgccgcctgcttcaaaccgctaacaatacctgggcccaccacaccgtgtgcattcgtaatgtctgcccattctgctattctgtatacacccgcagagtactgcaatttgactgtattaccaatgtcagcaaattttctgtcttcgaagagtaaaaaattgtacttggcggataatgcctttagcggcttaactgtgccctccatggaaaaatcagtcaagatatccacatgtgtttttagtaaacaaattttgggacctaatgcttcaactaac

SEQ ID NO: 507 - DNA, 7615 bp, Artificial Sequence
  PLAS458
tccagtaattccttggtggtacgaacatccaatgaagcacacaagtttgtttgcttttcgtgcatgatattaaatagcttggcagcaacaggactaggatgagtagcagcacgttccttatatgtagctttcgacatgatttatcttcgtttcctgcaggtttttgttctgtgcagttgggttaagaatactgggcaatttcatgtttcttcaacactacatatgcgtatatataccaatctaagtctgtgctccttccttcgttcttccttctgttcggagattaccgaatcaaaaaaatttcaaagaaaccgaaatcaaaaaaaagaataaaaaaaaaatgatgaattgaattgaaaagctagcttatcgatgataagctgtcaaagatgagaattaattccacggactatagactatactagatactccgtctactgtacgatacacttccgctcaggtccttgtcctttaacgaggccttaccactcttttgttactctattgatccagctcagcaaaggcagtgtgatctaagattctatcttcgcgatgtagtaaaactagctagaccgagaaagagactagaaatgcaaaaggcacttctacaatggctgccatcattattatccgatgtgacgctgcagcttctcaatgatattcgaatacgctttgaggagatacagcctaatatccgacaaactgttttacagatttacgatcgtacttgttacccatcattgaattttgaacatccgaacctgggagttttccctgaaacagatagtatatttgaacctgtataataatatatagtctagcgctttacggaagacaatgtatgtatttcggttcctggagaaactattgcatctattgcataggtaatcttgcacgtcgcatccccggttcattttctgcgtttccatcttgcacttcaatagcatatctttgttaacgaagcatctgtgcttcattttgtagaacaaaaatgcaacgcgagagcgctaatttttcaaacaaagaatctgagctgcatttttacagaacagaaatgcaacgcgaaagcgctattttaccaacgaagaatctgtgcttcatttttgtaaaacaaaaatgcaacgcgacgagagcgctaatttttcaaacaaagaatctgagctgcatttttacagaacagaaatgcaacgcgagagcgctattttaccaacaaagaatctatacttcttttttgttctacaaaaatgcatcccgagagcgctatttttctaacaaagcatcttagattactttttttctcctttgtgcgctctataatgcagtctcttgataactttttgcactgtaggtccgttaaggttagaagaaggctactttggtgtctattttctcttccataaaaaaagcctgactccacttcccgcgtttactgattactagcgaagctgcgggtgcattttttcaagataaaggcatccccgattatattctataccgatgtggattgcgcatactttgtgaacagaaagtgatagcgttgatgattcttcattggtcagaaaattatgaacggtttcttctattttgtctctatatactacgtataggaaatgtttacattttcgtattgttttcgattcactctatgaatagttcttactacaatttttttgtctaaagagtaatactagagataaacataaaaaatgtagaggtcgagtttagatgcaagttcaaggagcgaaaggtggatgggtaggttatatagggatatagcacagagatatatagcaaagagatacttttgagcaatgtttgtggaagcggtattcgcaatgggaagctccaccccggttgataatcagaaaagccccaaaaacaggaagattgtataagcaaatatttaaattgtaaacgttaatattttgttaaaattcgcgttaaatttttgttaaatcagctcattttttaacgaatagcccgaaatcggcaaaatcccttataaatcaaaagaatagaccgagatagggttgagtgttgttccagtttccaacaagagtccactattaaagaacgtggactccaacgtcaaagggcgaaaaagggtctatcagggcgatggcccactacgtgaaccatcaccctaatcaagttttttggggtcgaggtgccgtaaagcagtaaatcggaagggtaaacggatgcccccatttagagcttgacggggaaagccggcgaacgtggcgagaaaggaagggaagaaagcgaaaggagcgggggctagggcggtgggaagtgtaggggtcacgctgggcgtaaccaccacacccgccgcgcttaatggggcgctacagggcgcgtggggatgatccactagtacggattagaagccgccgagcgggtgacagccctccgaaggaagactctcctccgtgcgtcctcgtcttcaccggtcgcgttcctgaaacgcagatgtgcctcgcgccgcactgctccgaacaataaagattctacaatactagcttttatggttatgaagaggaaaaattggcagtaacctggccccacaaaccttcaaatgaacgaatcaaattaacaaccataggatgataatgcgattagttttttagccttatttctggggtaattaatcagcgaagcgatgatttttgatctattaacagatatataaatgcaaaaactgcataaccactttaactaatactttcaacattttcggtttgtattacttcttattcaaatgtaataaaagtatcaacaaaaaattgttaatatacctctatactttaacgtcaaggagaaaaaaccccggatcggactactagcagctgtaatacgactcactatagggaatattaagcttaaacaatgaggcaggtttggttctcttggattgtgggattgttcctatgttttttcaacgtgtcttctgctgctccagtcaacactacaacagaagatgaaacggcacaaattccggctgaagctgtcatcggttactcagatttagaaggggatttcgatgttgctgttttgccattttccaacagcacaaataacgggttattgtttataaatactactattgccagcattgctgctaaagaagaaggggtatctctcgagaaaagagaggctgaagctatgccaagagaaaacttcttgaagtgcttctcccaatatatcccaaacaacgctactaacttaaagttagtttacactcaaaacaatccattatacatgtctgtcttaaactctactattcataacttaagatttacttccgatactacccctaagccattggttatcgtcaccccatctcacgtctcccatatccaaggtactatcttatgttctaagaaggttggtttgcaaatccgtactagatctggtggtcacgacgctgaaggtatgtcctatatctctcaagtcccatttgtcattgttgacttaagaaatatgagatccattaaaattgatgttcattctcaaactgcttgggtcgaagctggtgccaccttgggtgaagtttactactgggtcaacgaaaaaaacgaaaacttatctttagctgccggttactgtccaaccgtctgtgctggtggtcatttcggtggtggtggttacggtccattgatgcgtaactacggtttagctgctgacaacattattgacgctcatttagttaatgttcacggtaaggttttggacagaaaatctatgggtgaagatttattttgggccttgagaggtggtggtgctgaatccttcggtatcatcgttgcctggaagattcgtttagttgctgtccctaagtccaccatgttctccgtcaagaaaatcatggaaattcatgagttggtcaaattggttaacaagtggcaaaacatcgcttacaagtatgacaaggatttgttgttaatgactcacttcatcacccgtaatatcaccgacaaccaaggtaagaacaaaactgctattcacacctacttctcctccgtttttttgggtggtgtcgactccttagtcgatttgatgaacaaatcctttccagaattgggtattaagaaaactgattgtagacaattgtcttggattgacaccattatcttctattctggtgtcgttaactacgacaccgacaactttaacaaggaaattttgttggatcgttctgctggtcaaaatggtgccttcaaaatcaaattggactacgtcaaaaagccaatcccagaatctgttttcgttcaaattttggaaaagttgtacgaagaagacattggtgccggtatgtatgctttgtatccatatggtggtatcatggacgaaatttccgaatctgccatcccattcccacacagagctggtattttatatgaattgtggtacatctgttcttgggaaaagcaagaagacaacgaaaagcatttaaactggattagaaacatttacaacttcatgaccccatacgtttctaagaacccaagattagcctatttgaactaccgtgacttagatattggtattaatgacccaaagaacccaaacaactatactcaagccagaatttggggtgaaaagtacttcggtaagaacttcgatagattagttaaggttaaaactttggtcgatccaaacaacttcttcagaaacgaacaatccatcccaccattgccaagacatcgtcacggctagctcgagcatgcatctagagggccgcatcatgtaattagttatgtcacgcttacattcacgccctccccccacatccgctctaaccgaaaaggaaggagttagacaacctgaagtctaggtccctatttatttttttatagttatgttagtattaagaacgttatttatatttcaaatttttcttttttttctgtacagacgcgtgtacgcatgtaacattatactgaaaaccttgcttgagaaggttttgggacgctcgaaggctttaatttgcggccctgcattaatgaatcggccaacgcgcggggagaggcggtttgcgtattgggcgctcttccgcttcctcgctcactgactcgctgcgctcggtcgttcggctgcggcgagcggtatcagctcactcaaaggcggtaatacggttatccacagaatcaggggataacgcaggaaagaacatgtgagcaaaaggccagcaaaagcccaggaaccgtaaaaaggccgcgttgctggcgtttttccataggctccgcccccctgacgagcatcacaaaaatcgacgctcaagtcagaggtggcgaaacccgacaggactataaagataccaggcgtttccccctggaagctccctcgtgcgctctcctgttccgaccctgccgcttaccggatacctgtccgcctttctcccttcgggaagcgtggcgctttctcatagctcacgctgtaggtatctcagttcggtgtaggtcgttcgctccaagctgggctgtgtgcacgaaccccccgttcagcccgaccgctgcgccttatccggtaactatcgtcttgagtccaacccggtaagacacgacttatcgccactggcagcagccactggtaacaggattagcagagcgaggtatgtaggcggtgctacagagttcttgaagtggtggcctaactacggctacactagaaggacagtatttggtatctgcgctctgctgaagccagttaccttcggaaaaagagttggtagctcttgatccggcaaacaaaccaccgctggtagcggtggtttttttgtttgcaagcagcagattacgcgcagaaaaaaaggatctcaagaagatcctttgatcttttctacggggtctgacgctcagtggaacgaaaactcacgttaagggattttggtcatgagattatcaaaaaggatcttcacctagatccttttaaattaaaaatgaagttttaaatcaatctaaagtatatatgagtaaacttggtctgacagttaccaatgcttaatcagtgaggcacctatctcagcgatctgtctatttcgttcatccatagttgcctgactccccgtcgtgtagataactacgatacgggagcgcttaccatctggccccagtgctgcaatgataccgcgagacccacgctcaccggctccagatttatcagcaataaaccagccagccggaagggccgagcgcagaagtggtcctgcaactttatccgcctccattcagtctattaattgttgccgggaagctagagtaagtagttcgccagttaatagtttgcgcaacgttgttggcattgctacaggcatcgtggtgtcactctcgtcgtttggtatggcttcattcagctccggttcccaacgatcaaggcgagttacatgatcccccatgttgtgcaaaaaagcggttagctccttcggtcctccgatcgttgtcagaagtaagttggccgcagtgttatcactcatggttatggcagcactgcataattctcttactgtcatgccatccgtaagatgcttttctgtgactggtgagtactcaaccaagtcattctgagaatagtgtatgcggcgaccgagttgctcttgcccggcgtcaatacgggataatagtgtatcacatagcagaactttaaaagtgctcatcattggaaaacgttcttcggggcgaaaactctcaaggatcttaccgctgttgagatccagttcgatgtaacccactcgtgcacccaactgatcttcagcatcttttactttcaccagcgtttctgggtgagcaaaaacaggaaggcaaaatgccgcaaaaaagggaataagggcgacacggaaatgttgaatactcatactcttcctttttcaatgggtaataactgatataattaaattgaagctctaatttgtgagtttagtatacatgcatttacttataatacagttttttagttttgctggccgcatcttctcaaatatgcttcccagcctgcttttctgtaacgttcaccctctaccttagcatcccttccctttgcaaatagtcctcttccaacaataataatgtcagatcctgtagagaccacatcatccacggttctatactgttgacccaatgcgtctcccttgtcatctaaacccacaccgggtgtcataatcaaccaatcgtaaccttcatctcttccacccatgtctctttgagcaataaagccgataacaaaatctttgtcgctcttcgcaatgtcaacagtacccttagtatattctccagtagatagggagcccttgcatgacaattctgctaacatcaaaaggcctctaggttcctttgttacttcttctgccgcctgcttcaaaccgctaacaatacctgggcccaccacaccgtgtgcattcgtaatgtctgcccattctgctattctgtatacacccgcagagtactgcaatttgactgtattaccaatgtcagcaaattttctgtcttcgaagagtaaaaaattgtacttggcggataatgcctttagcggcttaactgtgccctccatggaaaaatcagtcaagatatccacatgtgtttttagtaaacaaattttgggacctaatgcttcaactaac

SEQ ID NO: 508 - DNA, 7615 bp, Artificial Sequence
  PLAS510
tccagtaattccttggtggtacgaacatccaatgaagcacacaagtttgtttgcttttcgtgcatgatattaaatagcttggcagcaacaggactaggatgagtagcagcacgttccttatatgtagctttcgacatgatttatcttcgtttcctgcaggtttttgttctgtgcagttgggttaagaatactgggcaatttcatgtttcttcaacactacatatgcgtatatataccaatctaagtctgtgctccttccttcgttcttccttctgttcggagattaccgaatcaaaaaaatttcaaagaaaccgaaatcaaaaaaaagaataaaaaaaaaatgatgaattgaattgaaaagctagcttatcgatgataagctgtcaaagatgagaattaattccacggactatagactatactagatactccgtctactgtacgatacacttccgctcaggtccttgtcctttaacgaggccttaccactcttttgttactctattgatccagctcagcaaaggcagtgtgatctaagattctatcttcgcgatgtagtaaaactagctagaccgagaaagagactagaaatgcaaaaggcacttctacaatggctgccatcattattatccgatgtgacgctgcagcttctcaatgatattcgaatacgctttgaggagatacagcctaatatccgacaaactgttttacagatttacgatcgtacttgttacccatcattgaattttgaacatccgaacctgggagttttccctgaaacagatagtatatttgaacctgtataataatatatagtctagcgctttacggaagacaatgtatgtatttcggttcctggagaaactattgcatctattgcataggtaatcttgcacgtcgcatccccggttcattttctgcgtttccatcttgcacttcaatagcatatctttgttaacgaagcatctgtgcttcattttgtagaacaaaaatgcaacgcgagagcgctaatttttcaaacaaagaatctgagctgcatttttacagaacagaaatgcaacgcgaaagcgctattttaccaacgaagaatctgtgcttcatttttgtaaaacaaaaatgcaacgcgacgagagcgctaatttttcaaacaaagaatctgagctgcatttttacagaacagaaatgcaacgcgagagcgctattttaccaacaaagaatctatacttcttttttgttctacaaaaatgcatcccgagagcgctatttttctaacaaagcatcttagattactttttttctcctttgtgcgctctataatgcagtctcttgataactttttgcactgtaggtccgttaaggttagaagaaggctactttggtgtctattttctcttccataaaaaaagcctgactccacttcccgcgtttactgattactagcgaagctgcgggtgcattttttcaagataaaggcatccccgattatattctataccgatgtggattgcgcatactttgtgaacagaaagtgatagcgttgatgattcttcattggtcagaaaattatgaacggtttcttctattttgtctctatatactacgtataggaaatgtttacattttcgtattgttttcgattcactctatgaatagttcttactacaatttttttgtctaaagagtaatactagagataaacataaaaaatgtagaggtcgagtttagatgcaagttcaaggagcgaaaggtggatgggtaggttatatagggatatagcacagagatatatagcaaagagatacttttgagcaatgtttgtggaagcggtattcgcaatgggaagctccaccccggttgataatcagaaaagccccaaaaacaggaagattgtataagcaaatatttaaattgtaaacgttaatattttgttaaaattcgcgttaaatttttgttaaatcagctcattttttaacgaatagcccgaaatcggcaaaatcccttataaatcaaaagaatagaccgagatagggttgagtgttgttccagtttccaacaagagtccactattaaagaacgtggactccaacgtcaaagggcgaaaaagggtctatcagggcgatggcccactacgtgaaccatcaccctaatcaagttttttggggtcgaggtgccgtaaagcagtaaatcggaagggtaaacggatgcccccatttagagcttgacggggaaagccggcgaacgtggcgagaaaggaagggaagaaagcgaaaggagcgggggctagggcggtgggaagtgtaggggtcacgctgggcgtaaccaccacacccgccgcgcttaatggggcgctacagggcgcgtggggatgatccactagtacggattagaagccgccgagcgggtgacagccctccgaaggaagactctcctccgtgcgtcctcgtcttcaccggtcgcgttcctgaaacgcagatgtgcctcgcgccgcactgctccgaacaataaagattctacaatactagcttttatggttatgaagaggaaaaattggcagtaacctggccccacaaaccttcaaatgaacgaatcaaattaacaaccataggatgataatgcgattagttttttagccttatttctggggtaattaatcagcgaagcgatgatttttgatctattaacagatatataaatgcaaaaactgcataaccactttaactaatactttcaacattttcggtttgtattacttcttattcaaatgtaataaaagtatcaacaaaaaattgttaatatacctctatactttaacgtcaaggagaaaaaaccccggatcggactactagcagctgtaatacgactcactatagggaatattaagcttaaacaatgaggcaggtttggttctcttggattgtgggattgttcctatgttttttcaacgtgtcttctgctgctccagtcaacactacaacagaagatgaaacggcacaaattccggctgaagctgtcatcggttactcagatttagaaggggatttcgatgttgctgttttgccattttccaacagcacaaataacgggttattgtttataaatactactattgccagcattgctgctaaagaagaaggggtatctctcgagaaaagagaggctgaagctatgccaagagaaaacttcttgaagtgcttctcccaatatatcccaaacaacgctactaacttaaagttagtttacactcaaaacaatccattatacatgtctgtcttaaactctactattcataacttaagatttacttccgatactacccctaagccattggttatcgtcaccccatctcacgtctcccatatccaaggtactatcttatgttctaagaaggttggtttgcaaatccgtactagatctggtggtcacgactctgaaggtatgtcctatatctctcaagtcccatttgtcattgttgacttaagaaatatgagatccattaaaattgatgttcattctcaaactgcttgggtcgaagctggtgccaccttgggtgaagtttactactgggtcaacgaaaaaaacgaaaacttatctttagctgccggttactgtccaaccgtctgtgctggtggtcatttcggtggtggtggttacggtccattgatgcgtaactacggtttagctgctgacaacattattgacgctcatttagttaatgttcacggtaaggttttggacagaaaatctatgggtgaagatttattttgggccttgagaggtggtggtgctgaatccttcggtatcatcgttgcctggaagattcgtttagttgctgtccctaagtccaccatgttctccgtcaagaaaatcatggaaattcatgagttggtcaaattggttaacaagtggcaaaacatcgcttacaagtatgacaaggatttgttgttaatgactcacttcatcacccgtaatatcaccgacaaccaaggtaagaacaaaactgctattcacacctacttctcctccgtttttttgggtggtgtcgactccttagtcgatttgatgaacaaatcctttccagaattgggtattaagaaaactgattgtagacaattgtcttggattgacaccattatcttctattctggtgtcgttaactacgacaccgacaactttaacaaggaaattttgttggatcgttctgctggtcaaaatggtgccttcaaaatcaaattggactacgtcaaaaagccaatcccagaatctgttttcgttcaaattttggaaaagttgtacgaagaagacattggtgccggtatgtatgttttgtatccatatggtggtatcatggacgaaatttccgaatctgccatcccattcccacacagagctggtattttatatgaattgtggtacatctgttcttgggaaaagcaagaagacaacgaaaagcatttaaactggattagaaacatttacaacttcatgaccccatacgtttctaagaacccaagattagcctatttgaactaccgtgacttagatattggtattaatgacccaaagaacccaaacaactatactcaagccagaatttggggtgaaaagtacttcggtaagaacttcgatagattagttaaggttaaaactttggtcgatccaaacaacttcttcagaaacgaacaatccatcccaccattgccaagacatcgtcacggctagctcgagcatgcatctagagggccgcatcatgtaattagttatgtcacgcttacattcacgccctccccccacatccgctctaaccgaaaaggaaggagttagacaacctgaagtctaggtccctatttatttttttatagttatgttagtattaagaacgttatttatatttcaaatttttcttttttttctgtacagacgcgtgtacgcatgtaacattatactgaaaaccttgcttgagaaggttttgggacgctcgaaggctttaatttgcggccctgcattaatgaatcggccaacgcgcggggagaggcggtttgcgtattgggcgctcttccgcttcctcgctcactgactcgctgcgctcggtcgttcggctgcggcgagcggtatcagctcactcaaaggcggtaatacggttatccacagaatcaggggataacgcaggaaagaacatgtgagcaaaaggccagcaaaagcccaggaaccgtaaaaaggccgcgttgctggcgtttttccataggctccgcccccctgacgagcatcacaaaaatcgacgctcaagtcagaggtggcgaaacccgacaggactataaagataccaggcgtttccccctggaagctccctcgtgcgctctcctgttccgaccctgccgcttaccggatacctgtccgcctttctcccttcgggaagcgtggcgctttctcatagctcacgctgtaggtatctcagttcggtgtaggtcgttcgctccaagctgggctgtgtgcacgaaccccccgttcagcccgaccgctgcgccttatccggtaactatcgtcttgagtccaacccggtaagacacgacttatcgccactggcagcagccactggtaacaggattagcagagcgaggtatgtaggcggtgctacagagttcttgaagtggtggcctaactacggctacactagaaggacagtatttggtatctgcgctctgctgaagccagttaccttcggaaaaagagttggtagctcttgatccggcaaacaaaccaccgctggtagcggtggtttttttgtttgcaagcagcagattacgcgcagaaaaaaaggatctcaagaagatcctttgatcttttctacggggtctgacgctcagtggaacgaaaactcacgttaagggattttggtcatgagattatcaaaaaggatcttcacctagatccttttaaattaaaaatgaagttttaaatcaatctaaagtatatatgagtaaacttggtctgacagttaccaatgcttaatcagtgaggcacctatctcagcgatctgtctatttcgttcatccatagttgcctgactccccgtcgtgtagataactacgatacgggagcgcttaccatctggccccagtgctgcaatgataccgcgagacccacgctcaccggctccagatttatcagcaataaaccagccagccggaagggccgagcgcagaagtggtcctgcaactttatccgcctccattcagtctattaattgttgccgggaagctagagtaagtagttcgccagttaatagtttgcgcaacgttgttggcattgctacaggcatcgtggtgtcactctcgtcgtttggtatggcttcattcagctccggttcccaacgatcaaggcgagttacatgatcccccatgttgtgcaaaaaagcggttagctccttcggtcctccgatcgttgtcagaagtaagttggccgcagtgttatcactcatggttatggcagcactgcataattctcttactgtcatgccatccgtaagatgcttttctgtgactggtgagtactcaaccaagtcattctgagaatagtgtatgcggcgaccgagttgctcttgcccggcgtcaatacgggataatagtgtatcacatagcagaactttaaaagtgctcatcattggaaaacgttcttcggggcgaaaactctcaaggatcttaccgctgttgagatccagttcgatgtaacccactcgtgcacccaactgatcttcagcatcttttactttcaccagcgtttctgggtgagcaaaaacaggaaggcaaaatgccgcaaaaaagggaataagggcgacacggaaatgttgaatactcatactcttcctttttcaatgggtaataactgatataattaaattgaagctctaatttgtgagtttagtatacatgcatttacttataatacagttttttagttttgctggccgcatcttctcaaatatgcttcccagcctgcttttctgtaacgttcaccctctaccttagcatcccttccctttgcaaatagtcctcttccaacaataataatgtcagatcctgtagagaccacatcatccacggttctatactgttgacccaatgcgtctcccttgtcatctaaacccacaccgggtgtcataatcaaccaatcgtaaccttcatctcttccacccatgtctctttgagcaataaagccgataacaaaatctttgtcgctcttcgcaatgtcaacagtacccttagtatattctccagtagatagggagcccttgcatgacaattctgctaacatcaaaaggcctctaggttcctttgttacttcttctgccgcctgcttcaaaccgctaacaatacctgggcccaccacaccgtgtgcattcgtaatgtctgcccattctgctattctgtatacacccgcagagtactgcaatttgactgtattaccaatgtcagcaaattttctgtcttcgaagagtaaaaaattgtacttggcggataatgcctttagcggcttaactgtgccctccatggaaaaatcagtcaagatatccacatgtgtttttagtaaacaaattttgggacctaatgcttcaactaac

SEQ ID NO: 509 - DNA, 7615 bp, Artificial Sequence
  PLAS511
tccagtaattccttggtggtacgaacatccaatgaagcacacaagtttgtttgcttttcgtgcatgatattaaatagcttggcagcaacaggactaggatgagtagcagcacgttccttatatgtagctttcgacatgatttatcttcgtttcctgcaggtttttgttctgtgcagttgggttaagaatactgggcaatttcatgtttcttcaacactacatatgcgtatatataccaatctaagtctgtgctccttccttcgttcttccttctgttcggagattaccgaatcaaaaaaatttcaaagaaaccgaaatcaaaaaaaagaataaaaaaaaaatgatgaattgaattgaaaagctagcttatcgatgataagctgtcaaagatgagaattaattccacggactatagactatactagatactccgtctactgtacgatacacttccgctcaggtccttgtcctttaacgaggccttaccactcttttgttactctattgatccagctcagcaaaggcagtgtgatctaagattctatcttcgcgatgtagtaaaactagctagaccgagaaagagactagaaatgcaaaaggcacttctacaatggctgccatcattattatccgatgtgacgctgcagcttctcaatgatattcgaatacgctttgaggagatacagcctaatatccgacaaactgttttacagatttacgatcgtacttgttacccatcattgaattttgaacatccgaacctgggagttttccctgaaacagatagtatatttgaacctgtataataatatatagtctagcgctttacggaagacaatgtatgtatttcggttcctggagaaactattgcatctattgcataggtaatcttgcacgtcgcatccccggttcattttctgcgtttccatcttgcacttcaatagcatatctttgttaacgaagcatctgtgcttcattttgtagaacaaaaatgcaacgcgagagcgctaatttttcaaacaaagaatctgagctgcatttttacagaacagaaatgcaacgcgaaagcgctattttaccaacgaagaatctgtgcttcatttttgtaaaacaaaaatgcaacgcgacgagagcgctaatttttcaaacaaagaatctgagctgcatttttacagaacagaaatgcaacgcgagagcgctattttaccaacaaagaatctatacttcttttttgttctacaaaaatgcatcccgagagcgctatttttctaacaaagcatcttagattactttttttctcctttgtgcgctctataatgcagtctcttgataactttttgcactgtaggtccgttaaggttagaagaaggctactttggtgtctattttctcttccataaaaaaagcctgactccacttcccgcgtttactgattactagcgaagctgcgggtgcattttttcaagataaaggcatccccgattatattctataccgatgtggattgcgcatactttgtgaacagaaagtgatagcgttgatgattcttcattggtcagaaaattatgaacggtttcttctattttgtctctatatactacgtataggaaatgtttacattttcgtattgttttcgattcactctatgaatagttcttactacaatttttttgtctaaagagtaatactagagataaacataaaaaatgtagaggtcgagtttagatgcaagttcaaggagcgaaaggtggatgggtaggttatatagggatatagcacagagatatatagcaaagagatacttttgagcaatgtttgtggaagcggtattcgcaatgggaagctccaccccggttgataatcagaaaagccccaaaaacaggaagattgtataagcaaatatttaaattgtaaacgttaatattttgttaaaattcgcgttaaatttttgttaaatcagctcattttttaacgaatagcccgaaatcggcaaaatcccttataaatcaaaagaatagaccgagatagggttgagtgttgttccagtttccaacaagagtccactattaaagaacgtggactccaacgtcaaagggcgaaaaagggtctatcagggcgatggcccactacgtgaaccatcaccctaatcaagttttttggggtcgaggtgccgtaaagcagtaaatcggaagggtaaacggatgcccccatttagagcttgacggggaaagccggcgaacgtggcgagaaaggaagggaagaaagcgaaaggagcgggggctagggcggtgggaagtgtaggggtcacgctgggcgtaaccaccacacccgccgcgcttaatggggcgctacagggcgcgtggggatgatccactagtacggattagaagccgccgagcgggtgacagccctccgaaggaagactctcctccgtgcgtcctcgtcttcaccggtcgcgttcctgaaacgcagatgtgcctcgcgccgcactgctccgaacaataaagattctacaatactagcttttatggttatgaagaggaaaaattggcagtaacctggccccacaaaccttcaaatgaacgaatcaaattaacaaccataggatgataatgcgattagttttttagccttatttctggggtaattaatcagcgaagcgatgatttttgatctattaacagatatataaatgcaaaaactgcataaccactttaactaatactttcaacattttcggtttgtattacttcttattcaaatgtaataaaagtatcaacaaaaaattgttaatatacctctatactttaacgtcaaggagaaaaaaccccggatcggactactagcagctgtaatacgactcactatagggaatattaagcttaaacaatgaggcaggtttggttctcttggattgtgggattgttcctatgttttttcaacgtgtcttctgctgctccagtcaacactacaacagaagatgaaacggcacaaattccggctgaagctgtcatcggttactcagatttagaaggggatttcgatgttgctgttttgccattttccaacagcacaaataacgggttattgtttataaatactactattgccagcattgctgctaaagaagaaggggtatctctcgagaaaagagaggctgaagctatgccaagagaaaacttcttgaagtgcttctcccaatatatcccaaacaacgctactaacttaaagttagtttacactcaaaacaatccattatacatgtctgtcttaaactctactattcataacttaagatttacttccgatactacccctaagccattggttatcgtcaccccatctcacgtctcccatatccaaggtactatcttatgttctaagaaggttggtttgcaaatccgtactagatctggtggtcacgactctgaaggtatgtcctatatctctcaagtcccatttgtcattgttgacttaagaaatatgagatccattaaaattgatgttcattctcaaactgcttgggtcgaagctggtgccaccttgggtgaagtttactactgggtcaacgaaaaaaacgaaaacttatctttagctgccggttactgtccaaccgtctgtgctggtggtcatttcggtggtggtggttacggtccattgatgcgtaactacggtttagctgctgacaacattattgacgctcatttagttaatgttcacggtaaggttttggacagaaaatctatgggtgaagatttattttgggccttgagaggtggtggtgctgaatccttcggtatcatcgttgcctggaagattcgtttagttgctgtccctaagtccaccatgttctccgtcaagaaaatcatggaaattcatgagttggtcaaattggttaacaagtggcaaaacatcgcttacaagtatgacaaggatttgttgttaatgactcacttcatcacccgtaatatcaccgacaaccaaggtaagaacaaaactgctattcacacctacttctcctccgtttttttgggtggtgtcgactccttagtcgatttgatgaacaaatcctttccagaattgggtattaagaaaactgattgtagacaattgtcttggattgacaccattatcttctattctggtgtcgttaactacgacaccgacaactttaacaaggaaattttgttggatcgttctgctggtcaaaatattgccttcaaaatcaaattggactacgtcaaaaagccaatcccagaatctgttttcgttcaaattttggaaaagttgtacgaagaagacattggtgccggtatgtatgctttgtatccatatggtggtatcatggacgaaatttccgaatctgccatcccattcccacacagagctggtattttatatgaattgtggtacatctgttcttgggaaaagcaagaagacaacgaaaagcatttaaactggattagaaacatttacaacttcatgaccccatacgtttctaagaacccaagattagcctatttgaactaccgtgacttagatattggtattaatgacccaaagaacccaaacaactatactcaagccagaatttggggtgaaaagtacttcggtaagaacttcgatagattagttaaggttaaaactttggtcgatccaaacaacttcttcagaaacgaacaatccatcccaccattgccaagacatcgtcacggctagctcgagcatgcatctagagggccgcatcatgtaattagttatgtcacgcttacattcacgccctccccccacatccgctctaaccgaaaaggaaggagttagacaacctgaagtctaggtccctatttatttttttatagttatgttagtattaagaacgttatttatatttcaaatttttcttttttttctgtacagacgcgtgtacgcatgtaacattatactgaaaaccttgcttgagaaggttttgggacgctcgaaggctttaatttgcggccctgcattaatgaatcggccaacgcgcggggagaggcggtttgcgtattgggcgctcttccgcttcctcgctcactgactcgctgcgctcggtcgttcggctgcggcgagcggtatcagctcactcaaaggcggtaatacggttatccacagaatcaggggataacgcaggaaagaacatgtgagcaaaaggccagcaaaagcccaggaaccgtaaaaaggccgcgttgctggcgtttttccataggctccgcccccctgacgagcatcacaaaaatcgacgctcaagtcagaggtggcgaaacccgacaggactataaagataccaggcgtttccccctggaagctccctcgtgcgctctcctgttccgaccctgccgcttaccggatacctgtccgcctttctcccttcgggaagcgtggcgctttctcatagctcacgctgtaggtatctcagttcggtgtaggtcgttcgctccaagctgggctgtgtgcacgaaccccccgttcagcccgaccgctgcgccttatccggtaactatcgtcttgagtccaacccggtaagacacgacttatcgccactggcagcagccactggtaacaggattagcagagcgaggtatgtaggcggtgctacagagttcttgaagtggtggcctaactacggctacactagaaggacagtatttggtatctgcgctctgctgaagccagttaccttcggaaaaagagttggtagctcttgatccggcaaacaaaccaccgctggtagcggtggtttttttgtttgcaagcagcagattacgcgcagaaaaaaaggatctcaagaagatcctttgatcttttctacggggtctgacgctcagtggaacgaaaactcacgttaagggattttggtcatgagattatcaaaaaggatcttcacctagatccttttaaattaaaaatgaagttttaaatcaatctaaagtatatatgagtaaacttggtctgacagttaccaatgcttaatcagtgaggcacctatctcagcgatctgtctatttcgttcatccatagttgcctgactccccgtcgtgtagataactacgatacgggagcgcttaccatctggccccagtgctgcaatgataccgcgagacccacgctcaccggctccagatttatcagcaataaaccagccagccggaagggccgagcgcagaagtggtcctgcaactttatccgcctccattcagtctattaattgttgccgggaagctagagtaagtagttcgccagttaatagtttgcgcaacgttgttggcattgctacaggcatcgtggtgtcactctcgtcgtttggtatggcttcattcagctccggttcccaacgatcaaggcgagttacatgatcccccatgttgtgcaaaaaagcggttagctccttcggtcctccgatcgttgtcagaagtaagttggccgcagtgttatcactcatggttatggcagcactgcataattctcttactgtcatgccatccgtaagatgcttttctgtgactggtgagtactcaaccaagtcattctgagaatagtgtatgcggcgaccgagttgctcttgcccggcgtcaatacgggataatagtgtatcacatagcagaactttaaaagtgctcatcattggaaaacgttcttcggggcgaaaactctcaaggatcttaccgctgttgagatccagttcgatgtaacccactcgtgcacccaactgatcttcagcatcttttactttcaccagcgtttctgggtgagcaaaaacaggaaggcaaaatgccgcaaaaaagggaataagggcgacacggaaatgttgaatactcatactcttcctttttcaatgggtaataactgatataattaaattgaagctctaatttgtgagtttagtatacatgcatttacttataatacagttttttagttttgctggccgcatcttctcaaatatgcttcccagcctgcttttctgtaacgttcaccctctaccttagcatcccttccctttgcaaatagtcctcttccaacaataataatgtcagatcctgtagagaccacatcatccacggttctatactgttgacccaatgcgtctcccttgtcatctaaacccacaccgggtgtcataatcaaccaatcgtaaccttcatctcttccacccatgtctctttgagcaataaagccgataacaaaatctttgtcgctcttcgcaatgtcaacagtacccttagtatattctccagtagatagggagcccttgcatgacaattctgctaacatcaaaaggcctctaggttcctttgttacttcttctgccgcctgcttcaaaccgctaacaatacctgggcccaccacaccgtgtgcattcgtaatgtctgcccattctgctattctgtatacacccgcagagtactgcaatttgactgtattaccaatgtcagcaaattttctgtcttcgaagagtaaaaaattgtacttggcggataatgcctttagcggcttaactgtgccctccatggaaaaatcagtcaagatatccacatgtgtttttagtaaacaaattttgggacctaatgcttcaactaac

SEQ ID NO: 510 - DNA, 7615 bp, Artificial Sequence
  PLAS512
tccagtaattccttggtggtacgaacatccaatgaagcacacaagtttgtttgcttttcgtgcatgatattaaatagcttggcagcaacaggactaggatgagtagcagcacgttccttatatgtagctttcgacatgatttatcttcgtttcctgcaggtttttgttctgtgcagttgggttaagaatactgggcaatttcatgtttcttcaacactacatatgcgtatatataccaatctaagtctgtgctccttccttcgttcttccttctgttcggagattaccgaatcaaaaaaatttcaaagaaaccgaaatcaaaaaaaagaataaaaaaaaaatgatgaattgaattgaaaagctagcttatcgatgataagctgtcaaagatgagaattaattccacggactatagactatactagatactccgtctactgtacgatacacttccgctcaggtccttgtcctttaacgaggccttaccactcttttgttactctattgatccagctcagcaaaggcagtgtgatctaagattctatcttcgcgatgtagtaaaactagctagaccgagaaagagactagaaatgcaaaaggcacttctacaatggctgccatcattattatccgatgtgacgctgcagcttctcaatgatattcgaatacgctttgaggagatacagcctaatatccgacaaactgttttacagatttacgatcgtacttgttacccatcattgaattttgaacatccgaacctgggagttttccctgaaacagatagtatatttgaacctgtataataatatatagtctagcgctttacggaagacaatgtatgtatttcggttcctggagaaactattgcatctattgcataggtaatcttgcacgtcgcatccccggttcattttctgcgtttccatcttgcacttcaatagcatatctttgttaacgaagcatctgtgcttcattttgtagaacaaaaatgcaacgcgagagcgctaatttttcaaacaaagaatctgagctgcatttttacagaacagaaatgcaacgcgaaagcgctattttaccaacgaagaatctgtgcttcatttttgtaaaacaaaaatgcaacgcgacgagagcgctaatttttcaaacaaagaatctgagctgcatttttacagaacagaaatgcaacgcgagagcgctattttaccaacaaagaatctatacttcttttttgttctacaaaaatgcatcccgagagcgctatttttctaacaaagcatcttagattactttttttctcctttgtgcgctctataatgcagtctcttgataactttttgcactgtaggtccgttaaggttagaagaaggctactttggtgtctattttctcttccataaaaaaagcctgactccacttcccgcgtttactgattactagcgaagctgcgggtgcattttttcaagataaaggcatccccgattatattctataccgatgtggattgcgcatactttgtgaacagaaagtgatagcgttgatgattcttcattggtcagaaaattatgaacggtttcttctattttgtctctatatactacgtataggaaatgtttacattttcgtattgttttcgattcactctatgaatagttcttactacaatttttttgtctaaagagtaatactagagataaacataaaaaatgtagaggtcgagtttagatgcaagttcaaggagcgaaaggtggatgggtaggttatatagggatatagcacagagatatatagcaaagagatacttttgagcaatgtttgtggaagcggtattcgcaatgggaagctccaccccggttgataatcagaaaagccccaaaaacaggaagattgtataagcaaatatttaaattgtaaacgttaatattttgttaaaattcgcgttaaatttttgttaaatcagctcattttttaacgaatagcccgaaatcggcaaaatcccttataaatcaaaagaatagaccgagatagggttgagtgttgttccagtttccaacaagagtccactattaaagaacgtggactccaacgtcaaagggcgaaaaagggtctatcagggcgatggcccactacgtgaaccatcaccctaatcaagttttttggggtcgaggtgccgtaaagcagtaaatcggaagggtaaacggatgcccccatttagagcttgacggggaaagccggcgaacgtggcgagaaaggaagggaagaaagcgaaaggagcgggggctagggcggtgggaagtgtaggggtcacgctgggcgtaaccaccacacccgccgcgcttaatggggcgctacagggcgcgtggggatgatccactagtacggattagaagccgccgagcgggtgacagccctccgaaggaagactctcctccgtgcgtcctcgtcttcaccggtcgcgttcctgaaacgcagatgtgcctcgcgccgcactgctccgaacaataaagattctacaatactagcttttatggttatgaagaggaaaaattggcagtaacctggccccacaaaccttcaaatgaacgaatcaaattaacaaccataggatgataatgcgattagttttttagccttatttctggggtaattaatcagcgaagcgatgatttttgatctattaacagatatataaatgcaaaaactgcataaccactttaactaatactttcaacattttcggtttgtattacttcttattcaaatgtaataaaagtatcaacaaaaaattgttaatatacctctatactttaacgtcaaggagaaaaaaccccggatcggactactagcagctgtaatacgactcactatagggaatattaagcttaaacaatgaggcaggtttggttctcttggattgtgggattgttcctatgttttttcaacgtgtcttctgctgctccagtcaacactacaacagaagatgaaacggcacaaattccggctgaagctgtcatcggttactcagatttagaaggggatttcgatgttgctgttttgccattttccaacagcacaaataacgggttattgtttataaatactactattgccagcattgctgctaaagaagaaggggtatctctcgagaaaagagaggctgaagctatgccatgggaaaacttcttgaagtgcttctcccaatatatcccaaacaacgctactaacttaaagttagtttacactcaaaacaatccattatacatgtctgtcttaaactctactattcataacttaagatttacttccgatactacccctaagccattggttatcgtcaccccatctcacgtctcccatatccaaggtactatcttatgttctaagaaggttggtttgcaaatccgtactagatctggtggtcacgactctgaaggtatgtcctatatctctcaagtcccatttgtcattgttgacttaagaaatatgagatccattaaaattgatgttcattctcaaactgcttgggtcgaagctggtgccaccttgggtgaagtttactactgggtcaacgaaaaaaacgaaaacttatctttagctgccggttactgtccaaccgtctgtgctggtggtcatttcggtggtggtggttacggtccattgatgcgtaactacggtttagctgctgacaacattattgacgctcatttagttaatgttcacggtaaggttttggacagaaaatctatgggtgaagatttattttgggccttgagaggtggtggtgctgaatccttcggtatcatcgttgcctggaagattcgtttagttgctgtccctaagtccaccatgttctccgtcaagaaaatcatggaaattcatgagttggtcaaattggttaacaagtggcaaaacatcgcttacaagtatgacaaggatttgttgttaatgactcacttcatcacccgtaatatcaccgacaaccaaggtaagaacaaaactgctattcacacctacttctcctccgtttttttgggtggtgtcgactccttagtcgatttgatgaacaaatcctttccagaattgggtattaagaaaactgattgtagacaattgtcttggattgacaccattatcttctattctggtgtcgttaactacgacaccgacaactttaacaaggaaattttgttggatcgttctgctggtcaaaatggtgccttcaaaatcaaattggactacgtcaaaaagccaatcccagaatctgttttcgttcaaattttggaaaagttgtacgaagaagacattggtgccggtatgtatgctttgtatccatatggtggtatcatggacgaaatttccgaatctgccatcccattcccacacagagctggtattttatatgaattgtggtacatctgttcttgggaaaagcaagaagacaacgaaaagcatttaaactggattagaaacatttacaacttcatgaccccatacgtttctaagaacccaagattagcctatttgaactaccgtgacttagatattggtattaatgacccaaagaacccaaacaactatactcaagccagaatttggggtgaaaagtacttcggtaagaacttcgatagattagttaaggttaaaactttggtcgatccaaacaacttcttcagaaacgaacaatccatcccaccattgccaagacatcgtcacggctagctcgagcatgcatctagagggccgcatcatgtaattagttatgtcacgcttacattcacgccctccccccacatccgctctaaccgaaaaggaaggagttagacaacctgaagtctaggtccctatttatttttttatagttatgttagtattaagaacgttatttatatttcaaatttttcttttttttctgtacagacgcgtgtacgcatgtaacattatactgaaaaccttgcttgagaaggttttgggacgctcgaaggctttaatttgcggccctgcattaatgaatcggccaacgcgcggggagaggcggtttgcgtattgggcgctcttccgcttcctcgctcactgactcgctgcgctcggtcgttcggctgcggcgagcggtatcagctcactcaaaggcggtaatacggttatccacagaatcaggggataacgcaggaaagaacatgtgagcaaaaggccagcaaaagcccaggaaccgtaaaaaggccgcgttgctggcgtttttccataggctccgcccccctgacgagcatcacaaaaatcgacgctcaagtcagaggtggcgaaacccgacaggactataaagataccaggcgtttccccctggaagctccctcgtgcgctctcctgttccgaccctgccgcttaccggatacctgtccgcctttctcccttcgggaagcgtggcgctttctcatagctcacgctgtaggtatctcagttcggtgtaggtcgttcgctccaagctgggctgtgtgcacgaaccccccgttcagcccgaccgctgcgccttatccggtaactatcgtcttgagtccaacccggtaagacacgacttatcgccactggcagcagccactggtaacaggattagcagagcgaggtatgtaggcggtgctacagagttcttgaagtggtggcctaactacggctacactagaaggacagtatttggtatctgcgctctgctgaagccagttaccttcggaaaaagagttggtagctcttgatccggcaaacaaaccaccgctggtagcggtggtttttttgtttgcaagcagcagattacgcgcagaaaaaaaggatctcaagaagatcctttgatcttttctacggggtctgacgctcagtggaacgaaaactcacgttaagggattttggtcatgagattatcaaaaaggatcttcacctagatccttttaaattaaaaatgaagttttaaatcaatctaaagtatatatgagtaaacttggtctgacagttaccaatgcttaatcagtgaggcacctatctcagcgatctgtctatttcgttcatccatagttgcctgactccccgtcgtgtagataactacgatacgggagcgcttaccatctggccccagtgctgcaatgataccgcgagacccacgctcaccggctccagatttatcagcaataaaccagccagccggaagggccgagcgcagaagtggtcctgcaactttatccgcctccattcagtctattaattgttgccgggaagctagagtaagtagttcgccagttaatagtttgcgcaacgttgttggcattgctacaggcatcgtggtgtcactctcgtcgtttggtatggcttcattcagctccggttcccaacgatcaaggcgagttacatgatcccccatgttgtgcaaaaaagcggttagctccttcggtcctccgatcgttgtcagaagtaagttggccgcagtgttatcactcatggttatggcagcactgcataattctcttactgtcatgccatccgtaagatgcttttctgtgactggtgagtactcaaccaagtcattctgagaatagtgtatgcggcgaccgagttgctcttgcccggcgtcaatacgggataatagtgtatcacatagcagaactttaaaagtgctcatcattggaaaacgttcttcggggcgaaaactctcaaggatcttaccgctgttgagatccagttcgatgtaacccactcgtgcacccaactgatcttcagcatcttttactttcaccagcgtttctgggtgagcaaaaacaggaaggcaaaatgccgcaaaaaagggaataagggcgacacggaaatgttgaatactcatactcttcctttttcaatgggtaataactgatataattaaattgaagctctaatttgtgagtttagtatacatgcatttacttataatacagttttttagttttgctggccgcatcttctcaaatatgcttcccagcctgcttttctgtaacgttcaccctctaccttagcatcccttccctttgcaaatagtcctcttccaacaataataatgtcagatcctgtagagaccacatcatccacggttctatactgttgacccaatgcgtctcccttgtcatctaaacccacaccgggtgtcataatcaaccaatcgtaaccttcatctcttccacccatgtctctttgagcaataaagccgataacaaaatctttgtcgctcttcgcaatgtcaacagtacccttagtatattctccagtagatagggagcccttgcatgacaattctgctaacatcaaaaggcctctaggttcctttgttacttcttctgccgcctgcttcaaaccgctaacaatacctgggcccaccacaccgtgtgcattcgtaatgtctgcccattctgctattctgtatacacccgcagagtactgcaatttgactgtattaccaatgtcagcaaattttctgtcttcgaagagtaaaaaattgtacttggcggataatgcctttagcggcttaactgtgccctccatggaaaaatcagtcaagatatccacatgtgtttttagtaaacaaattttgggacctaatgcttcaactaac

SEQ ID NO: 511 - DNA, 7618 bp, Artificial Sequence
  PLAS513
tccagtaattccttggtggtacgaacatccaatgaagcacacaagtttgtttgcttttcgtgcatgatattaaatagcttggcagcaacaggactaggatgagtagcagcacgttccttatatgtagctttcgacatgatttatcttcgtttcctgcaggtttttgttctgtgcagttgggttaagaatactgggcaatttcatgtttcttcaacactacatatgcgtatatataccaatctaagtctgtgctccttccttcgttcttccttctgttcggagattaccgaatcaaaaaaatttcaaagaaaccgaaatcaaaaaaaagaataaaaaaaaaatgatgaattgaattgaaaagctagcttatcgatgataagctgtcaaagatgagaattaattccacggactatagactatactagatactccgtctactgtacgatacacttccgctcaggtccttgtcctttaacgaggccttaccactcttttgttactctattgatccagctcagcaaaggcagtgtgatctaagattctatcttcgcgatgtagtaaaactagctagaccgagaaagagactagaaatgcaaaaggcacttctacaatggctgccatcattattatccgatgtgacgctgcagcttctcaatgatattcgaatacgctttgaggagatacagcctaatatccgacaaactgttttacagatttacgatcgtacttgttacccatcattgaattttgaacatccgaacctgggagttttccctgaaacagatagtatatttgaacctgtataataatatatagtctagcgctttacggaagacaatgtatgtatttcggttcctggagaaactattgcatctattgcataggtaatcttgcacgtcgcatccccggttcattttctgcgtttccatcttgcacttcaatagcatatctttgttaacgaagcatctgtgcttcattttgtagaacaaaaatgcaacgcgagagcgctaatttttcaaacaaagaatctgagctgcatttttacagaacagaaatgcaacgcgaaagcgctattttaccaacgaagaatctgtgcttcatttttgtaaaacaaaaatgcaacgcgacgagagcgctaatttttcaaacaaagaatctgagctgcatttttacagaacagaaatgcaacgcgagagcgctattttaccaacaaagaatctatacttcttttttgttctacaaaaatgcatcccgagagcgctatttttctaacaaagcatcttagattactttttttctcctttgtgcgctctataatgcagtctcttgataactttttgcactgtaggtccgttaaggttagaagaaggctactttggtgtctattttctcttccataaaaaaagcctgactccacttcccgcgtttactgattactagcgaagctgcgggtgcattttttcaagataaaggcatccccgattatattctataccgatgtggattgcgcatactttgtgaacagaaagtgatagcgttgatgattcttcattggtcagaaaattatgaacggtttcttctattttgtctctatatactacgtataggaaatgtttacattttcgtattgttttcgattcactctatgaatagttcttactacaatttttttgtctaaagagtaatactagagataaacataaaaaatgtagaggtcgagtttagatgcaagttcaaggagcgaaaggtggatgggtaggttatatagggatatagcacagagatatatagcaaagagatacttttgagcaatgtttgtggaagcggtattcgcaatgggaagctccaccccggttgataatcagaaaagccccaaaaacaggaagattgtataagcaaatatttaaattgtaaacgttaatattttgttaaaattcgcgttaaatttttgttaaatcagctcattttttaacgaatagcccgaaatcggcaaaatcccttataaatcaaaagaatagaccgagatagggttgagtgttgttccagtttccaacaagagtccactattaaagaacgtggactccaacgtcaaagggcgaaaaagggtctatcagggcgatggcccactacgtgaaccatcaccctaatcaagttttttggggtcgaggtgccgtaaagcagtaaatcggaagggtaaacggatgcccccatttagagcttgacggggaaagccggcgaacgtggcgagaaaggaagggaagaaagcgaaaggagcgggggctagggcggtgggaagtgtaggggtcacgctgggcgtaaccaccacacccgccgcgcttaatggggcgctacagggcgcgtggggatgatccactagtacggattagaagccgccgagcgggtgacagccctccgaaggaagactctcctccgtgcgtcctcgtcttcaccggtcgcgttcctgaaacgcagatgtgcctcgcgccgcactgctccgaacaataaagattctacaatactagcttttatggttatgaagaggaaaaattggcagtaacctggccccacaaaccttcaaatgaacgaatcaaattaacaaccataggatgataatgcgattagttttttagccttatttctggggtaattaatcagcgaagcgatgatttttgatctattaacagatatataaatgcaaaaactgcataaccactttaactaatactttcaacattttcggtttgtattacttcttattcaaatgtaataaaagtatcaacaaaaaattgttaatatacctctatactttaacgtcaaggagaaaaaaccccggatcggactactagcagctgtaatacgactcactatagggaatattaagcttaaacaatgaggcaggtttggttctcttggattgtgggattgttcctatgttttttcaacgtgtcttctgctgctccagtcaacactacaacagaagatgaaacggcacaaattccggctgaagctgtcatcggttactcagatttagaaggggatttcgatgttgctgttttgccattttccaacagcacaaataacgggttattgtttataaatactactattgccagcattgctgctaaagaagaaggggtatctctcgagaaaagagaggctgaagctatgccaagagaaaacttcttgaagtgcttctcccaatatatcccaaacaacgctactaacttaaagttagtttacactcaaaacaatccattatacatgtctgtcttaaactctactattcataacttaagatttacttccgatactacccctaagccattggttatcgtcaccccatctcacgtctcccatatccaaggtactatcttatgttctaagaaggttggtttgcaaatccgtactagatctggtggtcacgactctgaaggtatgtcctatatctctcaagtcccatttgtcattgttgacttaagaaatatgagatccattaaaattgatgttcattctcaaactgcttgggtcgaagctggtgccaccttgggtgaagtttactactgggtcaacgaaaaaaacgaaaacttatctttagctgccggttactgtccaaccgtctgtgctggtggtcatttcggtggtggtggttacggtccattgatgcgtaactacggtttagctgctgacaacattattgacgctcatttagttaatgttcacggtaaggttttggacagaaaatctatgggtgaagatttattttgggccttgagaggtggtggtgctgaatccttcggtatcatcgttgcctggaagattcgtttagttgctgtcccttctaagtccaccatgttctccgtcaagaaaatcatggaaattcatgagttggtcaaattggttaacaagtggcaaaacatcgcttacaagtatgacaaggatttgttgttaatgactcacttcatcacccgtaatatcaccgacaaccaaggtaagaacaaaactgctattcacacctacttctcctccgtttttttgggtggtgtcgactccttagtcgatttgatgaacaaatcctttccagaattgggtattaagaaaactgattgtagacaattgtcttggattgacaccattatcttctattctggtgtcgttaactacgacaccgacaactttaacaaggaaattttgttggatcgttctgctggtcaaaatggtgccttcaaaatcaaattggactacgtcaaaaagccaatcccagaatctgttttcgttcaaattttggaaaagttgtacgaagaagacattggtgccggtatgtatgctttgtatccatatggtggtatcatggacgaaatttccgaatctgccatcccattcccacacagagctggtattttatatgaattgtggtacatctgttcttgggaaaagcaagaagacaacgaaaagcatttaaactggattagaaacatttacaacttcatgaccccatacgtttctaagaacccaagattagcctatttgaactaccgtgacttagatattggtattaatgacccaaagaacccaaacaactatactcaagccagaatttggggtgaaaagtacttcggtaagaacttcgatagattagttaaggttaaaactttggtcgatccaaacaacttcttcagaaacgaacaatccatcccaccattgccaagacatcgtcacggctagctcgagcatgcatctagagggccgcatcatgtaattagttatgtcacgcttacattcacgccctccccccacatccgctctaaccgaaaaggaaggagttagacaacctgaagtctaggtccctatttatttttttatagttatgttagtattaagaacgttatttatatttcaaatttttcttttttttctgtacagacgcgtgtacgcatgtaacattatactgaaaaccttgcttgagaaggttttgggacgctcgaaggctttaatttgcggccctgcattaatgaatcggccaacgcgcggggagaggcggtttgcgtattgggcgctcttccgcttcctcgctcactgactcgctgcgctcggtcgttcggctgcggcgagcggtatcagctcactcaaaggcggtaatacggttatccacagaatcaggggataacgcaggaaagaacatgtgagcaaaaggccagcaaaagcccaggaaccgtaaaaaggccgcgttgctggcgtttttccataggctccgcccccctgacgagcatcacaaaaatcgacgctcaagtcagaggtggcgaaacccgacaggactataaagataccaggcgtttccccctggaagctccctcgtgcgctctcctgttccgaccctgccgcttaccggatacctgtccgcctttctcccttcgggaagcgtggcgctttctcatagctcacgctgtaggtatctcagttcggtgtaggtcgttcgctccaagctgggctgtgtgcacgaaccccccgttcagcccgaccgctgcgccttatccggtaactatcgtcttgagtccaacccggtaagacacgacttatcgccactggcagcagccactggtaacaggattagcagagcgaggtatgtaggcggtgctacagagttcttgaagtggtggcctaactacggctacactagaaggacagtatttggtatctgcgctctgctgaagccagttaccttcggaaaaagagttggtagctcttgatccggcaaacaaaccaccgctggtagcggtggtttttttgtttgcaagcagcagattacgcgcagaaaaaaaggatctcaagaagatcctttgatcttttctacggggtctgacgctcagtggaacgaaaactcacgttaagggattttggtcatgagattatcaaaaaggatcttcacctagatccttttaaattaaaaatgaagttttaaatcaatctaaagtatatatgagtaaacttggtctgacagttaccaatgcttaatcagtgaggcacctatctcagcgatctgtctatttcgttcatccatagttgcctgactccccgtcgtgtagataactacgatacgggagcgcttaccatctggccccagtgctgcaatgataccgcgagacccacgctcaccggctccagatttatcagcaataaaccagccagccggaagggccgagcgcagaagtggtcctgcaactttatccgcctccattcagtctattaattgttgccgggaagctagagtaagtagttcgccagttaatagtttgcgcaacgttgttggcattgctacaggcatcgtggtgtcactctcgtcgtttggtatggcttcattcagctccggttcccaacgatcaaggcgagttacatgatcccccatgttgtgcaaaaaagcggttagctccttcggtcctccgatcgttgtcagaagtaagttggccgcagtgttatcactcatggttatggcagcactgcataattctcttactgtcatgccatccgtaagatgcttttctgtgactggtgagtactcaaccaagtcattctgagaatagtgtatgcggcgaccgagttgctcttgcccggcgtcaatacgggataatagtgtatcacatagcagaactttaaaagtgctcatcattggaaaacgttcttcggggcgaaaactctcaaggatcttaccgctgttgagatccagttcgatgtaacccactcgtgcacccaactgatcttcagcatcttttactttcaccagcgtttctgggtgagcaaaaacaggaaggcaaaatgccgcaaaaaagggaataagggcgacacggaaatgttgaatactcatactcttcctttttcaatgggtaataactgatataattaaattgaagctctaatttgtgagtttagtatacatgcatttacttataatacagttttttagttttgctggccgcatcttctcaaatatgcttcccagcctgcttttctgtaacgttcaccctctaccttagcatcccttccctttgcaaatagtcctcttccaacaataataatgtcagatcctgtagagaccacatcatccacggttctatactgttgacccaatgcgtctcccttgtcatctaaacccacaccgggtgtcataatcaaccaatcgtaaccttcatctcttccacccatgtctctttgagcaataaagccgataacaaaatctttgtcgctcttcgcaatgtcaacagtacccttagtatattctccagtagatagggagcccttgcatgacaattctgctaacatcaaaaggcctctaggttcctttgttacttcttctgccgcctgcttcaaaccgctaacaatacctgggcccaccacaccgtgtgcattcgtaatgtctgcccattctgctattctgtatacacccgcagagtactgcaatttgactgtattaccaatgtcagcaaattttctgtcttcgaagagtaaaaaattgtacttggcggataatgcctttagcggcttaactgtgccctccatggaaaaatcagtcaagatatccacatgtgtttttagtaaacaaattttgggacctaatgcttcaactaac

SEQ ID NO: 512 - DNA, 4137 bp, Artificial Sequence
  OstI-pro-alpha-f(I)-OXC53
caagaaggattttctggcatttgcttattgaaagcgtcttcaattatattaaaactaaaattgaagtttccaaaaaagaaagatagaactgatattagcaaattgtgtgacaagaaagaacggatgacacagtggttagaaatttcaattttgatgaactgagaataataatattatgctcccctggattttatgcgaagacactgctgaaaaaatttctgatatatgcagagaaggagcaaataagccagttttaaggaaccgagataagctgttttcgcccattgttctagttctacaaaatatctacagggaatcgatgaggttgtaagaaatcctgaatactctatgatagtgcataacactaaaaagttgaaagaatcccgtatcatggacgatttccttgaacatttgagcaaagacgataacaaagcatggtatggcgcggaagaaaccgagagagctgcaaaattagatgcaatagaaacactacttattacagatagtgtactaaaaaggaacgacgtgaaaaaacgtgaaaaatacctagacctaatagagaatagtggaaacaacaatggcaaaatattcgtactcagtacttcaaaaatcacagtgagcaacttgacaaaccaacaccttgccaacagggagttcttcagagacatggaggctcaaaacgaaattattgacagcctagacatcaatagtcatacaacagaaagcgaccacccaactttggctgataatagcgtataaacaatgcatactttgtacgttcaaaatacaatgcagtagatatatttatgcatattacatataatacatatcacataggaagcaacaggcgcgttggacttttaattttcgaggaccgcgaatccttacatcacacccaatcccccacaagtgatcccccacacaccatagcttcaaaatgtttctactccttttttactcttccagattttctcggactccgcgcatcgccgtaccacttcaaaacacccaagcacagcatactaaatttcccctctttcttcctctagggtgtcgttaattacccgtactaaaggtttggaaaagaaaaaagacaccgcctcgtttctttttcttcgtcgaaaaaggcaataaaaatttttatcacgtttctttttcttgaaaatttttttttttgatttttttctctttcgatgacctcccattgatatttaagttaataaacggtcatcaatttctcaagtttcagtttcatttttcttgttctattacaactttttttacttcttgctcattagaaagaaagcatagcaatctaatctaagttttaattacaaaatgaggcaggtttggttctcttggattgtgggattgttcctatgttttttcaacgtgtcttctgctgctccagtcaacactacaacagaagatgaaacggcacaaattccggctgaagctgtcatcggttactcagatttagaaggggatttcgatgttgctgttttgccattttccaacagcacaaataacgggttattgtttataaatactactattgccagcattgctgctaaagaagaaggggtatctctcgagaaaagagaggctgaagctatgccaagagaaaacttcttgaagtgtttctctaagcatatcccaaacaacgttgctaacccaaagttggtctatactcaacacgatcaattgtatatgtctattttgaactctactattcaaaatttgagattcatttctgataccaccccaaaaccattggtcattgtcactccttccaacaactcccatatccaagctactattttgtgttctaagaaggtcggtttgcaaatcagaaccagatctggtggtcacgatgccgagggtatgtcctacatttctcaagttccttttgtcgttgttgatttgagaaacatgcactccatcaaaattgatgttcactcccaaaccgcctgggtcgaagctggtgccactttgggtgaagtctactactggattaatgaaaagaatgaaaatttgtccttcccaggtggttactgtccaaccgttggtgttggtggtcacttctccggtggtggttacggtgctttgatgagaaactacggtttagctgctgataacattatcgacgcccacttggttaatgttgatggtaaagtcttggacagaaaatctatgggtgaagatttgttttgggccattagaggtggtggtggtgagaacttcggtatcattgctgcctggaagatcaaattggttgctgttccatctaagtccactattttttccgttaagaagaacatggaaatccatggtttagttaaattatttaacaagtggcaaaacattgcctacaagtacgataaagatttggttttgatgacccatttcattactaagaatattactgacaatcacggtaagaacaagactaccgttcacggttacttctcttctattttccacggtggtgtcgactccttagttgatttgatgaacaaatcctttccagagttgggtattaagaagactgattgtaaggaattctcttggattgacaccaccatcttctactctggtgtcgtcaactttaacactgccaactttaagaaggaaattttattggatagatccgctggtaagaagaccgctttttccatcaaattggattacgtcaagaagccaatccctgagactgccatggtcaagatcttggaaaagttgtatgaagaagacgttggtgctggtatgtacgttttatatccatacggtggtattatggaagagatttccgaatccgctattccattcccacatagagctggtatcatgtacgaattgtggtacactgcttcttgggaaaaacaagaagataatgaaaagcatattaactgggttagatccgtttacaacttcaccactccatatgtttctcaaaacccaagattggcttacttgaactatagagatttggatttgggtaagactaaccacgcctctccaaacaattacactcaagctagaatctggggtgaaaaatacttcggtaagaacttcaacagattagtcaaagtcaagaccaaagttgacccaaacaacttcttcagaaacgagcaatccattcctccattgcctccacaccatcacggccatcatcaccatcaccattagctcgagcatgcatctagagggccgcatcatgtaattagttatgtcacgcttacattcacgccctccccccacatccgctctaaccgaaaaggaaggagttagacaacctgaagtctaggtccctatttatttttttatagttatgttagtattaagaacgttatttatatttcaaatttttcttttttttctgtacagacgcgtgtacgcatgtaacattatactgaaaaccttgcttgagaaggttttgggacgctcgaaggctttaatttgccaatagcttgcagcgtagctaaactctaaaatttatctaaatcactcatataaaccgaacccttccccttccgcttatagtacagtacctatacatttcataaacatggcatggcgatcagcgccaaacaatatggaaaatccacagaaagctattcattgaaaaaatagtacaaataagtcacatgatgatatttgattttattatatttttaaaaaaagtaaaaaataaaaagtagtttatttttaaaaaataaaatttaaaatattagtgtatttgatttccgaaagttaaaaaagaaatagtaagaaatatatatttcattgaatggatatatgaaacgtttactggtggaagttttgctcatatattattattcaatagaagtaataaagaaaaagttggtaaagcaacttaacagtaaaaaggtaatgattgaaaaagtttttgaacatctaagctatatgttgatgggtttacaattttaccattagtactcatgcctatacttttctgttcgtccttaatgtccgcgatttagagcaatcattgaaagtactagatacattttagccagagaggactcgttgacgtagaattaaaattcaaatgaatttccgccccattcatataccccaaataacaaacatattaaaacttcataattattcaaa

SEQ ID NO: 513 - DNA, 4134 bp, Artificial Sequence
  OstI-pro-alpha-f(I)-OXC53 - S225 del
caagaaggattttctggcatttgcttattgaaagcgtcttcaattatattaaaactaaaattgaagtttccaaaaaagaaagatagaactgatattagcaaattgtgtgacaagaaagaacggatgacacagtggttagaaatttcaattttgatgaactgagaataataatattatgctcccctggattttatgcgaagacactgctgaaaaaatttctgatatatgcagagaaggagcaaataagccagttttaaggaaccgagataagctgttttcgcccattgttctagttctacaaaatatctacagggaatcgatgaggttgtaagaaatcctgaatactctatgatagtgcataacactaaaaagttgaaagaatcccgtatcatggacgatttccttgaacatttgagcaaagacgataacaaagcatggtatggcgcggaagaaaccgagagagctgcaaaattagatgcaatagaaacactacttattacagatagtgtactaaaaaggaacgacgtgaaaaaacgtgaaaaatacctagacctaatagagaatagtggaaacaacaatggcaaaatattcgtactcagtacttcaaaaatcacagtgagcaacttgacaaaccaacaccttgccaacagggagttcttcagagacatggaggctcaaaacgaaattattgacagcctagacatcaatagtcatacaacagaaagcgaccacccaactttggctgataatagcgtataaacaatgcatactttgtacgttcaaaatacaatgcagtagatatatttatgcatattacatataatacatatcacataggaagcaacaggcgcgttggacttttaattttcgaggaccgcgaatccttacatcacacccaatcccccacaagtgatcccccacacaccatagcttcaaaatgtttctactccttttttactcttccagattttctcggactccgcgcatcgccgtaccacttcaaaacacccaagcacagcatactaaatttcccctctttcttcctctagggtgtcgttaattacccgtactaaaggtttggaaaagaaaaaagacaccgcctcgtttctttttcttcgtcgaaaaaggcaataaaaatttttatcacgtttctttttcttgaaaatttttttttttgatttttttctctttcgatgacctcccattgatatttaagttaataaacggtcatcaatttctcaagtttcagtttcatttttcttgttctattacaactttttttacttcttgctcattagaaagaaagcatagcaatctaatctaagttttaattacaaaatgaggcaggtttggttctcttggattgtgggattgttcctatgttttttcaacgtgtcttctgctgctccagtcaacactacaacagaagatgaaacggcacaaattccggctgaagctgtcatcggttactcagatttagaaggggatttcgatgttgctgttttgccattttccaacagcacaaataacgggttattgtttataaatactactattgccagcattgctgctaaagaagaaggggtatctctcgagaaaagagaggctgaagctatgccaagagaaaacttcttgaagtgtttctctaagcatatcccaaacaacgttgctaacccaaagttggtctatactcaacacgatcaattgtatatgtctattttgaactctactattcaaaatttgagattcatttctgataccaccccaaaaccattggtcattgtcactccttccaacaactcccatatccaagctactattttgtgttctaagaaggtcggtttgcaaatcagaaccagatctggtggtcacgatgccgagggtatgtcctacatttctcaagttccttttgtcgttgttgatttgagaaacatgcactccatcaaaattgatgttcactcccaaaccgcctgggtcgaagctggtgccactttgggtgaagtctactactggattaatgaaaagaatgaaaatttgtccttcccaggtggttactgtccaaccgttggtgttggtggtcacttctccggtggtggttacggtgctttgatgagaaactacggtttagctgctgataacattatcgacgcccacttggttaatgttgatggtaaagtcttggacagaaaatctatgggtgaagatttgttttgggccattagaggtggtggtggtgagaacttcggtatcattgctgcctggaagatcaaattggttgctgttccaaagtccactattttttccgttaagaagaacatggaaatccatggtttagttaaattatttaacaagtggcaaaacattgcctacaagtacgataaagatttggttttgatgacccatttcattactaagaatattactgacaatcacggtaagaacaagactaccgttcacggttacttctcttctattttccacggtggtgtcgactccttagttgatttgatgaacaaatcctttccagagttgggtattaagaagactgattgtaaggaattctcttggattgacaccaccatcttctactctggtgtcgtcaactttaacactgccaactttaagaaggaaattttattggatagatccgctggtaagaagaccgctttttccatcaaattggattacgtcaagaagccaatccctgagactgccatggtcaagatcttggaaaagttgtatgaagaagacgttggtgctggtatgtacgttttatatccatacggtggtattatggaagagatttccgaatccgctattccattcccacatagagctggtatcatgtacgaattgtggtacactgcttcttgggaaaaacaagaagataatgaaaagcatattaactgggttagatccgtttacaacttcaccactccatatgtttctcaaaacccaagattggcttacttgaactatagagatttggatttgggtaagactaaccacgcctctccaaacaattacactcaagctagaatctggggtgaaaaatacttcggtaagaacttcaacagattagtcaaagtcaagaccaaagttgacccaaacaacttcttcagaaacgagcaatccattcctccattgcctccacaccatcacggccatcatcaccatcaccattagctcgagcatgcatctagagggccgcatcatgtaattagttatgtcacgcttacattcacgccctccccccacatccgctctaaccgaaaaggaaggagttagacaacctgaagtctaggtccctatttatttttttatagttatgttagtattaagaacgttatttatatttcaaatttttcttttttttctgtacagacgcgtgtacgcatgtaacattatactgaaaaccttgcttgagaaggttttgggacgctcgaaggctttaatttgccaatagcttgcagcgtagctaaactctaaaatttatctaaatcactcatataaaccgaacccttccccttccgcttatagtacagtacctatacatttcataaacatggcatggcgatcagcgccaaacaatatggaaaatccacagaaagctattcattgaaaaaatagtacaaataagtcacatgatgatatttgattttattatatttttaaaaaaagtaaaaaataaaaagtagtttatttttaaaaaataaaatttaaaatattagtgtatttgatttccgaaagttaaaaaagaaatagtaagaaatatatatttcattgaatggatatatgaaacgtttactggtggaagttttgctcatatattattattcaatagaagtaataaagaaaaagttggtaaagcaacttaacagtaaaaaggtaatgattgaaaaagtttttgaacatctaagctatatgttgatgggtttacaattttaccattagtactcatgcctatacttttctgttcgtccttaatgtccgcgatttagagcaatcattgaaagtactagatacattttagccagagaggactcgttgacgtagaattaaaattcaaatgaatttccgccccattcatataccccaaataacaaacatattaaaacttcataattattcaaa

SEQ ID NO: 514 - DNA, 7717 bp, Artificial Sequence; identical to SEQ ID NO: 99
  PKS110

1. (canceled)

2. (canceled)

3. (canceled)

4. (canceled)

5. (canceled)

6. (canceled)

7. (canceled)

8. (canceled)

9. (canceled)

10. (canceled)

11. (canceled)

12. (canceled)

13. (canceled)

14. (canceled)

15. (canceled)

16. (canceled)

17. (canceled)

18. (canceled)

19. (canceled)

20. (canceled)

21. (canceled)

22. (canceled)

23. (canceled)

24. (canceled)

25. (canceled)

26. (canceled)

27. (canceled)

28. (canceled)

29. (canceled)

30. (canceled)

31. (canceled)

32. (canceled)

33. (canceled)

34. (canceled)

35. (canceled)

36. (canceled)

37. (canceled)

38. (canceled)

39. (canceled)

40. (canceled)

41. (canceled)

42. (canceled)

43. (canceled)

44. (canceled)

45. (canceled)

46. (canceled)

47. (canceled)

48. (canceled)

49. (canceled)

50. (canceled)

51. (canceled)

52. (canceled)

53. (canceled)

54. (canceled)

55. (canceled)

56. (canceled)

57. (canceled)

58. (canceled)

59. (canceled)

60. (canceled)

61. (canceled)

62. (canceled)

63. (canceled)

64. (canceled)

65. (canceled)

66. (canceled)

67. (canceled)

68. (canceled)

69. (canceled)

70. (canceled)

71. (canceled)

72. (canceled)

73. (canceled)

74. (canceled)

75. (canceled)

76. (canceled)

77. (canceled)

78. (canceled)

79. (canceled)

80. (canceled)

81. (canceled)

82. (canceled)

83. (canceled)

84. (canceled)

85. (canceled)

86. (canceled)

87. (canceled)

88. (canceled)

89. (canceled)

90. (canceled)

91. (canceled)

92. (canceled)

93. (canceled)

94. (canceled)

95. (canceled)

96. (canceled)

97. (canceled)

98. (canceled)

99. (canceled)

100. (canceled)

101. (canceled)

102. (canceled)

103. (canceled)

104. (canceled)

105. (canceled)

106. (canceled)

107. (canceled)

108. (canceled)

109. (canceled)

110. (canceled)

111. (canceled)

112. (canceled)

113. (canceled)

114. (canceled)

115. (canceled)

116. (canceled)

117. (canceled)

118. (canceled)

119. (canceled)

120. (canceled)

121. (canceled)

122. (canceled)

123. (canceled)

124. (canceled)

125. (canceled)

126. (canceled)

127. (canceled)

128. (canceled)

129. (canceled)

130. (canceled)

131. (canceled)

132. (canceled)

133. (canceled)

134. A method of producing a phytocannabinoid or phytocannabinoid analogue in a host cell that produces a polyketide and a prenyl donor, said method comprising:
transforming said host cell with a sequence encoding a prenyltransferase PT296 protein, and
culturing said transformed host cell under conditions sufficient for production of the prenyltransferase PT296 protein to produce said phytocannabinoid or phytocannabinoid analogue;
wherein the wherein the prenyltransferase PT296 protein comprises a prenyltransferase protein as set forth in SEQ ID NO:440.

135. The method of claim 134, wherein the prenyltransferase PT296 protein comprises or consists of
a prenyltransferase protein with at least 95% identity with SEQ ID NO:440.

136. The method of claim 134, wherein the sequence encoding the prenyltransferase PT296 protein comprises or consists of:
(a) a nucleotide sequence encoding the protein of SEQ ID NO:440; or a nucleotide having a sequence according to SEQ ID NO:461;
(b) a nucleotide sequence having at least 85% identity with the nucleotide sequence of (a); or having at least 85% identity with SEQ ID NO461; or
(c) a nucleotide sequence that hybridizes with the complementary strand of the nucleic acid of (a) under conditions of high stringency.

137. The method of claim 134, wherein said polyketide is:

[chemical structure]

[chemical structure]

138. The method of any one of claim 134, wherein said prenyl donor is:

[chemical structure]

139. The method of claim 138, wherein the prenyl donor is geranyl diphosphate (GPP), farnesyl diphosphate (FPP), or neryl diphosphate (NPP).

140. The method of claim 134, wherein said phytocannabinoid or phytocannabinoid analogue is:

[chemical structure]

141. (canceled)

142. (canceled)

143. (canceled)

144. The method of claim 134, wherein said polyketide is olivetolic acid, and said phytocannabinoid is cannabigerolic acid (CBGa).

145. (canceled)

146. (canceled)

147. (canceled)

148. (canceled)

149. (canceled)

150. (canceled)

151. (canceled)

152. (canceled)

153. (canceled)

154. (canceled)

155. (canceled)

156. An expression vector comprising a nucleotide sequence encoding prenyltransferase PT296 protein, wherein said nucleotide sequence comprises:
at least 85% identity with a nucleotide sequence encoding SEQ ID NO:440; or
at least 85% identity with a nucleotide having a sequence according to SEQ ID NO:461.

157. (canceled)

158. A host cell transformed with the expression vector according to claim 156.

159. The host cell of claim 158, additionally comprising one or more of:
(a) a nucleic acid as set forth in any one of SEQ ID NO:441 to SEQ ID NO:453;
(b) a nucleic acid having at least 85% identity with the nucleotide sequence of (a);
(c) a nucleic acid that hybridizes with the complementary strand of the nucleic acid of (a) under stringent conditions; or
(d) a nucleic acid encoding a protein with the same enzyme activity as the protein encoded by any one of the nucleic acid sequences of (a).

160. (canceled)

161. (canceled)

162. (canceled)

163. (canceled)

164. (canceled)

165. (canceled)

166. (canceled)

167. (canceled)

168. (canceled)

169. (canceled)

170. (canceled)

171. (canceled)

172. (canceled)

173. (canceled)

174. (canceled)

175. (canceled)

176. (canceled)

177. (canceled)

178. (canceled)

179. (canceled)

180. (canceled)

181. (canceled)

182. (canceled)

183. (canceled)

184. (canceled)

185. (canceled)

186. (canceled)

187. (canceled)

188. (canceled)

189. (canceled)

190. (canceled)

191. (canceled)

192. (canceled)

193. (canceled)

194. (canceled)

195. (canceled)

196. (canceled)

197. (canceled)

198. (canceled)

199. (canceled)

200. (canceled)

201. (canceled)

202. (canceled)

203. (canceled)

204. (canceled)

205. (canceled)

206. (canceled)

207. (canceled)

208. (canceled)

209. (canceled)

210. (canceled)

211. (canceled)

212. (canceled)

213. A method of producing a phytocannabinoid comprising culturing a host cell under suitable culture conditions to form a phytocannabinoid, said host cell comprising:
(a) a polynucleotide encoding a polyketide synthase (PKS) enzyme;
(b) a polynucleotide encoding an olivetolic acid cyclase (OAC) enzyme;
(c) a polynucleotide encoding a prenyltransferase (PT) enzyme; and
(d) a polynucleotide encoding a THCa synthase (OXC) enzyme:
wherein the OXC enzyme comprises a protein with at least 85% sequence identity to any one of SEQ ID NO. 498-501:
and optionally comprising:
(e) a polynucleotide encoding an acyl-CoA synthase (Alk) enzyme; and/or
(f) polynucleotide encoding a fatty acyl CoA activating (CsAAE) enzyme.

214. The method of claim 213, wherein:
PKS comprises DiPKS-1-DiPKS-5 bearing G1516R, PKS73, or PKS80-PKS110;
OAC comprises csOAC or PC20;
PT comprises PT296;
CsAAE comprises CsAAE1; and/or
Alk comprises Alk1-Alk30.

215. The method of claim 213, wherein the host cell is cultured together with a butyric acid feed.

216. A method of transforming a host cell for production of a phytocannabinoid comprising:
introducing into the host cell line a polynucleotide encoding:
(a) a polyketide synthase (PKS) enzyme;
(b) an olivetolic acid cyclase (OAC) enzyme;
(c) a prenyltransferase (PT) enzyme; and
(d) a polynucleotide encoding a THCa synthase (OXC) enzyme:
wherein the OXC enzyme comprises a protein with at least 85% sequence identity to any one of SEQ ID NO. 498-501:
and optionally said polynucleotide additionally encoding:
(e) a polynucleotide encoding an acyl-CoA synthase (Alk) enzyme; and/or
(f) a polynucleotide encoding a fatty acyl CoA activating (CsAAE) enzyme.

217. The method of claim 216, wherein:
PKS comprises DiPKS-1-DiPKS-5 bearing G1516R, PKS73, or PKS80-PKS110;
OAC comprises csOAC or PC20;
PT comprises PT296;
CsAAE comprises CsAAE1; and/or
Alk comprises Alk1-Alk30.

218. (canceled)

219. An expression vector comprising:
a polynucleotide encoding a polyketide synthase (PKS) enzyme;
a polynucleotide encoding an olivetolic acid cyclase (OAC) enzyme;
a polynucleotide encoding a prenyltransferase (PT) enzyme; and
a polynucleotide encoding a THCa synthase (OXC) enzyme of at least 85% sequence identity with SEQ ID NO. 498-501.

220. The expression vector of claim 219, additionally comprising:
a polynucleotide encoding an acyl-CoA synthase (Alk) enzyme; and/or
a polynucleotide encoding CsAAE1.

221. AR The expression vector of claim 219, wherein
the polynucleotide encoding the OXC enzyme encodes a protein according to SEQ ID NO: 500; and/or
the polynucleotide encoding the prenyltransferase enzyme encodes a protein having at least 85% sequence identity to SEQ ID NO:440.

222. A host cell comprising the expression vector of claim 219.

223. (canceled)

224. (canceled)

225. The host cell of claim 222, wherein said host cell comprises a nucleotide encoding: SEQ ID NOs: 440 and 500.

226. The expression vector of claim 156, additionally comprising a nucleotide sequence encoding an OXC enzyme according to SEQ ID NO. 498-501.

227. A host cell comprising the expression vector of claim 226.

228. A prenyltransferase (PT) enzyme having a sequence according to SEQ ID NO:440, prepared by the host cell of claim 158.

229. A THCa synthase (OXC) enzyme having a sequence according to any one of SEQ ID NO:498-501, prepared by the host cell of claim 222.
